(19) United States
(12) Patent Application Publication
(10) Pub. No.: US 2011/0294680 A1
(43) Pub. Date: Dec. 1, 2011

(54) METHODS AND COMPOSITIONS FOR PREDICTING SUCCESS IN ADDICTIVE SUBSTANCE CESSATION AND FOR PREDICTING A RISK OF ADDICTION

(75) Inventors: Jed E. Rose, Durham, NC (US); George R. Uhl, Towson, MD (US)

(73) Assignee: Duke University, Durham, NC (US)

(21) Appl. No.: 12/918,940

(22) PCT Filed: Feb. 20, 2009
(86) PCT No.: PCT/US09/34694

§ 371 Date: Oct. 13, 2010

Related U.S. Application Data
(60) Provisional application No. 61/030,728, filed on Feb. 22, 2008.

(51) Int. Cl. C40B 30/04; C12Q 1/68; C07H 21/04

(52) U.S. Cl. 506/9; 536/23.1; 435/6.11

(57) ABSTRACT

The present invention relates to genetic polymorphisms that are associated with dependence on an addictive substance. In particular, the present invention relates to a method for predicting success in addictive substance cessation in a subject, such as predicting success in nicotine cessation. In some embodiments, nicotine cessation is accompanied by a nicotine replacement source and/or an antidepressant. The invention further provides a method for identifying a subject who has an increased risk of becoming dependent on an addictive substance. In some embodiments, the addictive substance is nicotine. Also provided are isolated nucleic acid molecules containing the polymorphisms and reagents for detecting the polymorphic nucleic acid molecules.

### STATEMENT REGARDING FEDERALLY SPONSORED RESEARCH OR DEVELOPMENT

[0001] This invention was made with United States government support under P50CA/DA84718 awarded by the National Institutes of Health Intramural Research Program, NIDA, DHSS. The United States government has certain rights in the invention.

### FIELD OF THE INVENTION

[0002] The present invention relates to methods for predicting an ability of a subject to quit using an addictive substance, as well as to methods for predicting a subject's risk of becoming dependent on an addictive substance.

### BACKGROUND OF THE INVENTION

[0003] Substance dependence, both legal and controlled, represents one of the most important preventable causes of illness and death in modern society. The path to addiction generally begins with a voluntary use of one or more addictive substances such as tobacco, alcohol, narcotics or any of a variety of other addictive substances. With extended use of the addictive substance, a voluntary ability to abstain from the addictive substance is compromised in many subjects. As such, substance addiction is generally characterized by compulsive substance craving, habitual substance seeking and substance use that persists even in the face of negative consequences. Substance addiction is also characterized in many cases by withdrawal symptoms.

[0004] Nicotine, as found in tobacco, is one such addictive substance. Worldwide, tobacco use causes nearly 5 million deaths per year, with current trends showing that tobacco use will cause more than 10 million deaths annually by 2020 (World Health Organization (2002) The World Health Report 2002: Reducing Risks, Promoting Healthy Life). In the United States, cigarette smoking is a leading preventable cause of death and is responsible for about one in five deaths annually, or about 438,000 deaths per year (Centers for Disease Control and Prevention (2005) Morbid. Mortal. Wkly Rep. 54:625-628). Nearly 21% of U.S. adults (45.1 million people) are current cigarette smokers (Centers for Disease Control and Prevention (2005) Morbid. Mortal. Wkly Rep. 54:1121-1124). Among adult smokers, 70% report that they want to quit completely (id.), and more than 40% try to quit each year (Substance Abuse and Mental Health Services Administration (2006) Results from the 2005 National Survey on Drug Use and Health: National Findings (Office of Applied Studies, NSDUH Series H-30, DHHS Publication No. SMA 06-4194)). Quitting smoking even after prolonged use of tobacco has substantial health benefits. Unfortunately, a majority of subjects who report quit attempts report that they failed to abstain permanently.

[0005] A primary goal of therapy or treatment of substance addiction is to reduce the amount and/or rate of intake of the addictive substance over time, as well as to reduce the rate of relapse. Individuals afflicted with an addictive condition who succeed in obtaining a reduction or complete cessation of intake of the addictive substance remain at a substantial risk to relapse during the course of their lifetimes. To completely eradicate the addictive condition over the subject's lifetime often requires life-long administration of therapy, be it pharmacological, behavioral or both.

[0006] Substance cessation programs typically address both pharmacological and psychological factors. Vulnerability to substance dependence, however, is a substantially heritable complex disorder (Karkowski et al. (2000) Am. J. Med. Genet. 96:665-670; Tsuang et al. (1998) Arch. Gen. Psychiatry 55:967-972; True et al. (1999) Am. J. Med. Genet. 88:391-397). Classical genetic studies also indicate that individual differences in an ability to successfully quit using the addictive substance are substantially heritable, but differ from those that influence aspects of dependence (Xian et al. (2003) Nicotine Tob. Res. 5:245-254). Therefore, there remains a need for methods to predict a likelihood of successful cessation of an addictive substance, as well as for methods to predict a potential for substance dependence or addiction.

### SUMMARY OF THE INVENTION

[0007] The present invention relates to an identification of novel sets of single nucleotide polymorphisms (SNPs), unique combinations of such SNPs and haplotypes of SNPs that are associated with 1) an increased ability to quit using an addictive substance or 2) an increased risk of becoming dependent on an addictive substance. The SNPs disclosed herein are useful as targets for designing diagnostic reagents based on genetic profiling for use in determining a subject's genetic predisposition to 1) quit using an addictive substance or 2) become dependent on an addictive substance.

[0008] In a first aspect of the invention, a method for predicting success in addictive substance cessation in a subject includes detecting a SNP at one or more polymorphic sites of genes (or gene sequences) described herein in a nucleic acid complement of the subject, where the presence of the SNP is correlated with an increased rate of success in addictive substance cessation.

[0009] In one embodiment of this aspect, a method for predicting success in nicotine cessation in a subject using a nicotine replacement source and/or an antidepressant includes detecting a SNP at one or more polymorphic sites of genes (or gene sequences) described herein in a nucleic acid complement of the subject, where the presence of the SNP is correlated with an increased rate of success in nicotine cessation in the subject using a nicotine replacement source and/or an antidepressant. The nicotine replacement source can be a nicotine patch, a nicotine gum, a nicotine inhaler and/or a nicotine nasal spray, and the antidepressant can be bupropion.

[0010] In a second aspect of the invention, a method of determining a subject's genetic predisposition to becoming dependent on an addictive substance includes obtaining a nucleic acid sample from the subject and determining an identity of one or more bases (nucleotides) at polymorphic sites of genes (or gene sequences) described herein, where the presence of a particular base is correlated with an increased risk of becoming dependent on the addictive substance.

[0011] In a third aspect of the invention, a method for developing an individualized treatment regimen for addictive substance cessation in a subject dependent on an addictive substance includes detecting a SNP at one or more polymorphic sites of genes (or gene sequences) described herein in a nucleic acid complement of the subject, where the presence of the SNP is correlated with an individualized treatment regimen through a genetic association between specific SNPs, the particular addictive substance the subject is dependent on and rates of success in addictive substance cessation in individuals utilizing behavioral modification and/or pharmacological therapy. The addictive substance can be nicotine.

[0012] A fourth aspect of the invention includes allele-specific oligonucleotides that hybridize to reference or variant alleles of genes including a SNP or to the complement thereof. These oligonucleotides can be probes or primers.

### DETAILED DESCRIPTION OF THE INVENTION

[0013] The present invention provides SNPs associated with quit success of an addictive substance or an increased risk of becoming dependent on an addictive substance, nucleic acid molecules containing the SNPs disclosed herein, methods and reagents for detecting the SNPs disclosed herein, uses of the SNPs disclosed herein for developing detection reagents, and assays or kits utilizing such reagents. The addictive substance-associated SNPs disclosed herein therefore are useful for diagnosing, screening and evaluating quit success or predisposition to becoming dependent on the addictive substance.

[0014] The genomes of all organisms undergo spontaneous mutation throughout evolution, generating variant forms of progenitor genetic sequences (Gusella (1986) Ann. Rev. Biochem. 55:831-854). A variant form may confer an evolutionary advantage or disadvantage relative to a progenitor form or may be neutral. In some instances, the variant form of the progenitor genetic sequence confers an evolutionary advantage to organisms and is eventually incorporated into the DNA of many or most organisms and effectively becomes the progenitor form.

[0015] In addition, the effects of the variant form may be both beneficial and detrimental, depending on the circumstances. For example, a heterozygous sickle cell mutation confers resistance to malaria, but a homozygous sickle cell mutation is usually lethal. In many cases, both progenitor and variant forms of a genetic sequence survive and co-exist in a species population. The coexistence of multiple forms of a genetic sequence gives rise to genetic polymorphisms, including SNPs.

[0016] Approximately 90% of all polymorphisms in the human genome are SNPs. SNPs are single base positions in DNA at which different alleles, or alternative nucleotides, exist in a population. SNP position (interchangeably referred to herein as SNP, SNP site, SNP locus, SNP marker or marker) is usually preceded and followed by highly conserved sequences of the allele (e.g., sequences that vary in less than 1/100 or 1/1000 members of the population). A subject may be homozygous or heterozygous for the allele at each SNP position. A SNP can, in some instances, be referred to as a “cSNP,” which denotes that the nucleotide sequence containing the SNP is an amino acid coding sequence.

[0017] A SNP also may arise from a substitution of one nucleotide for another at the polymorphic site. Substitutions can be transitions or transversions. A transition is the replacement of one purine by another purine, or one pyrimidine by another pyrimidine. A transversion is the replacement of a purine by a pyrimidine or a pyrimidine by a purine. A SNP may also be a single base insertion or deletion variant referred to as an “indel” (Weber et al. (2002) Am. J. Hum. Genet. 71:854-862).

[0018] A synonymous codon change, or silent mutation SNP (terms such as “SNP,” “polymorphism,” “mutation,” “mutant,” “variation” and “variant” are used herein interchangeably), is one that does not result in a change of amino acid due to the degeneracy of the genetic code. A substitution that changes a codon coding for one amino acid to a codon coding for a different amino acid (i.e., a non-synonymous codon change) is referred to as a missense mutation. A nonsense mutation results in a type of non-synonymous codon change in which a stop codon is formed, thereby leading to premature termination of a polypeptide chain and a truncated protein. A read-through mutation is another type of non-synonymous codon change that causes the destruction of a stop codon, thereby resulting in an extended polypeptide product. While SNPs can be bi-, tri-, or tetra-allelic, the vast majority of the SNPs are bi-allelic, and are thus often referred to as “bi-allelic markers” or “di-allelic markers.”

[0019] As used herein, references to SNPs and SNP genotypes include individual SNPs and/or haplotypes, which are groups of SNPs that are generally inherited together. Haplotypes can have stronger correlations with increased risk of becoming dependent on an addictive substance compared with individual SNPs, and therefore can provide increased diagnostic accuracy in some cases (Stephens et al. (2001) Science 293:489-493).

[0020] An association study of a SNP and an increased risk of becoming dependent on an addictive substance involves determining a presence or frequency of the SNP allele(s) in biological samples from test subjects with a dependency of interest, such as nicotine dependency, and comparing the information to that of control subjects (i.e., subjects who are not dependent on the addictive substance) who are usually of similar age and race. A SNP may be screened in any biological sample obtained from a test subject and compared to like samples from control subjects, and selected for its increased occurrence in a specific or general dependency on one or more addictive substances, such as nicotine dependency. Once a statistically significant association is established between one or more SNP(s) and a dependency on an addictive substance of interest, then the region around the SNP can optionally be thoroughly screened to identify the causative genetic locus/sequence(s) (e.g., causative SNP mutation, gene, regulatory region, and the like) that influences the dependency.

[0021] Thus, the present invention pertains to a method for predicting success in addictive substance cessation in a subject, including detecting a SNP in one or more (e.g., 2, 3, 4, 5, 10, 15, 20, 25, 30, 40, 50, 60, 70, 80, 90, 100, 150, 200, 250, 300, 350, 400, 450, 500, 550, 600, 650, 700, 750, 800, 850, 900, 950, 1000 or any number in-between) nucleotide sequences set forth in SEQ ID NOs:1-14724 in a nucleic acid complement of the subject (see, Table 1). In a non-limiting example, the nucleotide sequences can be at least twenty or more of the nucleotide sequences set forth in SEQ ID NOs:1-14724. The presence of the SNP is correlated with an increased rate of success in addictive substance cessation.

[0022] By addictive substance “cessation” is intended a bringing or coming to an end; a ceasing or stopping (i.e., of use of the addictive substance). By an “increased rate” of success in addictive substance cessation is meant a higher than normal rate of ceasing or stopping use of an addictive substance by a subject, compared to the general population. In a non-limiting example, the addictive substance is nicotine. In a further embodiment, the subject presently is dependent on an addictive substance (e.g., nicotine).

[0023] By “addictive substance” is intended any substance that causes or is characterized by addiction, that is, strong physiological and/or psychological dependence on the substance. Addictive substances include, but are not limited to, nicotine; alcohol; cannabis (e.g., marijuana); stimulants, such as cocaine and amphetamines (e.g., methamphetamine and Ecstasy); hallucinogens (e.g., LSD, PCP and ketamine); depressants (e.g., diazepam and barbiturates); sleep aids (e.g., eszopiclone, ramelteon and zolpidem); psychotropic medications, such as anti-psychotics (e.g., haloperidol, loxapine, aripiprazole, and olanzapine); antidepressants (e.g., fluoxetine, nortriptyline, sertraline and bupropion); anti-anxiety agents (e.g., diazepam, alprazolam and sertraline); and narcotics, such as heroin, codeine, morphine and oxycodone. For review, see, Substance Abuse: A Comprehensive Textbook (Lowinson et al. eds. 2^{nd} ed. Lippincott Williams & Wilkins, NY, 2005).

[0024] The term “nucleic acid complement” of a subject refers to a total nucleic acid content of the subject (e.g., as found in a biological sample, such as a cell, of a subject), and includes a full set of genes (i.e., DNA), their translation products (i.e., RNA) and non-coding genetic material.

[0025] SNP genotyping to identify a subject with an increased risk of becoming dependent on an addictive substance, predicting success in addictive substance cessation in a subject, predicting success in nicotine cessation in a subject using a nicotine replacement source and/or an antidepressant, and other uses described herein, typically relies on initially establishing a genetic association between one or more (e.g., 2, 3, 4, 5, 10, 15, 20, 25, 30, 40, 50, 60, 70, 80, 90, 100, 150, 200, 250, 300, 350, 400, 450, 500, 550, 600, 650, 700, 750, 800, 850, 900, 950, 1000 or any number in-between) specific SNPs and the particular traits, habits or actions of interest.

[0026] Different study designs may be used for genetic association studies (see, e.g., Modern Epidemiology pp. 609-622 (Lippincott Williams & Wilkins 1998). One such study design is an observational study. Observational studies are most frequently carried out in which a response of subjects is not interfered with. One type of observational study is a case-control or retrospective study. In typical case-control studies, samples are collected from subjects with the habit or action of interest (cases), such as dependency on one or more addictive substances, and from individuals in whom dependency is absent (controls) in a population (target population) that conclusions are to be drawn from. Then, the possible causes of the traits, habits or actions, e.g., dependency on an addictive substance, such as nicotine, are investigated retrospectively. There may be potential confounding factors that should be taken into consideration. Confounding factors are those that are associated with both the real cause(s) of the dependency and the dependency itself, and they may include demographic information such as age, gender and ethnicity, as well as environmental factors. When confounding factors are not matched in cases and controls in a study, and are not controlled properly, spurious association results can arise. If potential confounding factors are identified, they can be controlled for by analysis methods well known to those of ordinary skill in the art.

[0027] Another study design is a genetic association study. In a genetic association study, a cause of interest to be tested is a certain allele or a SNP, or a combination of alleles or a haplotype from several SNPs. Thus, tissue specimens (e.g., blood) from a subject can be collected and genomic DNA genotyped for the SNP(s) of interest. In addition to the trait or habit of interest, other information such as demographic (e.g., age, gender and ethnicity), clinical and environmental information that may influence the outcome of the trait or habit can be collected to further characterize and define the sample set. In many cases, this information is known to be associated with dependency and/or SNP allele frequencies. There are likely gene-environment and/or gene-gene interactions as well.

[0028] After all the relevant trait, habit and/or action information and genotypic information is obtained, statistical analyses can be carried out to determine if there is any significant correlation between the presence of an allele or a genotype with the substance dependency of the subject. Data inspection and cleaning can be first performed before carrying out statistical tests for genetic association. Epidemiological and clinical data of the samples can be summarized by descriptive statistics with tables and graphs. Data validation can be performed to check for data completion, inconsistent entries, and outliers. Chi-squared tests and t-tests (Wilcoxon rank-sum tests if distributions are not normal) then can be used to check for significant differences between cases and controls for discrete and continuous variables, respectively. To ensure genotyping quality, Hardy-Weinberg disequilibrium tests can be performed on cases and controls separately. Significant deviation from Hardy-Weinberg equilibrium in both cases and controls for individual markers can be indicative of genotyping errors.

[0029] To test whether an allele of a SNP is associated with the case or control status of a trait or habit, one of ordinary skill in the art can compare allele frequencies in cases and controls. Standard chi-squared tests and Fisher exact tests can be carried out on a 2×2 table (2 SNP alleles by 2 outcomes in the categorical trait of interest). To test whether genotypes of a SNP are associated, chi-squared tests can be carried out on a 3×2 table (3 genotypes by 2 outcomes). Score tests can also carried out for genotypic association to contrast the three genotypic frequencies (major homozygotes, heterozygotes and minor homozygotes) in cases and controls, and to look for trends using three different modes of inheritance, namely dominant (with contrast coefficients 2, −1, −1), additive (with contrast coefficients 1, 0, −1) and recessive (with contrast coefficients 1, 1, 2). Odds ratios for minor versus major alleles, and odds ratios for heterozygote and homozygote variants versus the wild-type genotypes are calculated with the desired confidence limits, usually 95%. For samples genotyped in DNA pools, t-tests assess the relationship between relative allelic frequencies in cases versus controls. To control for confounders and to test for interaction and effect modifiers, stratified analyses can be performed using stratified factors that are likely to be confounding, including demographic information such as age, ethnicity and gender, or an interacting element or effect modifier such as known major genes (e.g., nicotine metabolizing enzymes for nicotine dependency) or environmental factors such as polysubstance abuse.

[0030] In addition to performing association tests one marker at a time, haplotype association analysis can also be performed to study a number of markers that are closely linked together. Haplotype association tests may have better power than genotypic or allelic association tests when the tested markers are not the mutations causing the predisposition to dependency themselves, but are in linkage disequilibrium with such mutations. In order to perform haplotype association effectively, marker-marker linkage disequilibrium measures, both D and R², are typically calculated for the markers within a gene to elucidate the haplotype structure. Studies in linkage disequilibrium suggest that SNPs within a given gene are organized in block pattern, and a high degree of linkage disequilibrium exists within blocks and very little linkage disequilibrium exists between blocks (Daly et al. (2001) Nat. Gen. 29:232-235). Haplotype association with predisposition to dependency on an addictive substance can be performed using such blocks once they have been elucidated. Haplotype association tests can be carried out in a similar fashion as the allelic and genotypic association tests. Each haplotype in a gene is analogous to an allele in a multi-allelic marker. One of ordinary skill in the art either can compare the haplotype frequencies in cases and controls or can test genetic association with different pairs of haplotypes.

[0031] An important decision in performing genetic association tests is determining a significance level at which significant association can be declared when a p-value of the tests reaches that level. In an exploratory analysis where positive hits will be followed up in subsequent confirmatory testing, an unadjusted p-value<0.1 can be used for generating hypotheses for significant association of a SNP with certain traits or habits associated with substance dependency. Generally, a p-value<0.05 is required for a SNP for an association with a predisposition to dependency on an addictive substance, and a p-value<0.01 is required for an association to be declared. When hits are followed up in confirmatory analyses in more samples of the same source or in different samples from different sources, adjustment for multiple testing can be performed so as to avoid excess number of hits while maintaining the experiment-wise error rates at 0.05. While there are different methods known to one of ordinary skill in the art to adjust for multiple testing to control for different kinds of error rates, a commonly used method is Bonferroni correction to control the experiment-wise or family-wise error rate (Westfall et al. (1999) Multiple Comparisons and Multiple Tests (SAS Institute)). Permutation tests to control for false discovery rates also can be used (Benjamini & Hochberg (1995) J. Royal Stat. Soc. B 57:1289-1300). Monte Carlo simulation studies are especially useful in correcting for false positive results, since these tests can take into account many of the features of the true datasets without reliance on underlying statistical models. Since both genotyping and addiction status classification can involve errors, sensitivity analyses may be performed to see how odds ratios and p-values would change upon various estimates on genotyping and addiction status classification error rates.

[0032] Determining which specific nucleotide (i.e., allele) is present at each of one or more SNP positions, such as a SNP position in a nucleic acid molecule disclosed in Table 1, is referred to as SNP genotyping. The present invention therefore provides methods for SNP genotyping, such as predicting success in addictive substance cessation in a subject, predicting success in nicotine cessation in a subject using a nicotine replacement source and/or an antidepressant, identifying a subject with an increased risk of becoming dependent on an addictive substance, or other uses as described herein.

[0033] Nucleic acid samples can be genotyped to determine which alleles are present at any given genetic region (e.g., SNP position) of interest by methods well known in the art. Neighboring sequences can be used to design SNP detection reagents such as oligonucleotide probes, which may optionally be implemented in a kit format. Exemplary SNP genotyping methods are known in the art (Chen et al. (2003) Pharmacogenomics J. 3:77-96; Kwok et al. (2003) Curr. Issues Mol. Biol. 5:43-60; Shi, Am. J. Pharmacogenomics (2002) 2:197-205; and Kwok (2001) Annu. Rev. Genomics Hum. Genet. 2:235-258). Exemplary techniques for high-throughput SNP genotyping are described by Marnellos (Marnellos (2003) Curr. Opin. Drug Discov. Devel. 6:317-321). Common SNP genotyping methods include, but are not limited to, TaqMan® Gene Expression Assays (Applied Biosystems, Inc.; Foster City, Calif.), molecular beacon assays, nucleic acid arrays, allele-specific primer extension, allele-specific polymerase chain reaction (PCR), arrayed primer extension, homogeneous primer extension assays, primer extension with detection by mass spectrometry, pyrosequencing, multiplex primer extension sorted on genetic arrays, ligation with rolling circle amplification, homogeneous ligation, multiplex ligation reaction sorted on genetic arrays, restriction-fragment length polymorphism (RFLP) and single base extension-tag assays. Such methods can be used in combination with detection mechanisms such as, e g., luminescence or chemiluminescence detection, fluorescence detection, time-resolved fluorescence detection, fluorescence resonance energy transfer, fluorescence polarization, mass spectrometry and electrical detection.

[0034] Various methods for detecting polymorphisms include, but are not limited to, methods in which protection from cleavage agents is used to detect mismatched bases in RNA/RNA or RNA/DNA duplexes (Myers et al. (1985) Science 230:1242-1246; Cotton et al. (1988) Proc. Natl. Acad. Sci. USA 85:4397-4401; Saleeba et al. (1992) Meth. Enzymol. 217:286-295), comparison of the electrophoretic mobility of variant and wild-type nucleic acid molecules (Orita et al. (1989) Proc. Natl. Acad. Sci. USA 86:2766-2770; Cotton et al. (1992) Mutat. Res. 285:125-144; Hayashi et al. (1992) Genet. Anal. Tech. Appl. 9:73-79) and assaying the movement of polymorphic or wild-type fragments in polyacrylamide gels containing a gradient of denaturant using denaturing gradient gel electrophoresis (Myers et al. (1985) Nature 313:495-498). Sequence variations at specific locations also can be assessed by nuclease protection assays such as RNase and S1 protection assays or chemical cleavage methods.

[0035] In a specific embodiment, SNP genotyping is performed using the TaqMan® Assay, which also is known as a 5 nuclease assay (see, e.g., U.S. Pat. Nos. 5,210,015 and 5,538,848). The TaqMan® Assay detects accumulation of a specific amplified product during PCR. It utilizes an oligonucleotide probe labeled with a fluorescent reporter and quencher dye. When the reporter dye is excited by irradiation at an appropriate wavelength, it transfers energy to the quencher dye in the same probe via a process called fluorescence resonance energy transfer (FRET). As such, when attached to the probe, the excited reporter dye does not emit a signal. The proximity of the quencher dye to the reporter dye in the intact probe maintains a reduced fluorescence for the reporter dye. The reporter and quencher dyes can be at the 5-most and the 3-most ends of the probe, respectively, or vice versa. Alternatively, the reporter dye can be at the 5- or 3-most end of the probe, while the quencher dye is attached to an internal nucleotide, or vice versa. Alternatively, both the reporter and quencher dyes can be attached to internal nucleotides of the probe at a distance from each other, such that fluorescence of the reporter dye is reduced.

[0036] During PCR, the 5 nuclease activity of DNA polymerase cleaves the probe, thereby separating the reporter dye and the quencher dye and resulting in increased fluorescence of the reporter. Accumulation of PCR product is detected directly by monitoring the increase in fluorescence of the reporter dye. The DNA polymerase cleaves the probe between the reporter dye and the quencher dye only if the probe hybridizes to the target SNP-containing template, which is amplified during PCR, and the probe is designed to hybridize to the target SNP site only if a particular SNP allele is present. Preferred TaqMan primer and probe sequences can readily be determined using the SNP and associated nucleic acid sequence information provided herein. A number of computer programs, such as Primer Express (Applied Biosystems, Foster City, Calif.), can be used to rapidly obtain optimal primer/probe sets. It will be apparent to one of skill in the art that such primers and probes for detecting the SNPs of the present invention are useful in diagnostic assays for identifying a subject who has an increased risk of becoming dependent on an addictive substance, predicting success in addictive substance cessation in a subject and predicting success in nicotine cessation in a subject using a nicotine replacement source and/or an antidepressant, and can be readily incorporated into a kit format. The present invention also includes modifications of the TaqMan® Assay well known in the art, such as the use of molecular beacon probes (see, e.g., U.S. Pat. Nos. 5,118,801 and 5,312,728) and other variant formats (see, e.g., U.S. Pat. Nos. 5,866,336 and 6,117,635).

[0037] Another method for SNP genotyping is based on mass spectrometry, and takes advantage of the unique mass of each of the four nucleotides of DNA. Single nucleotide polymorphisms can be unambiguously genotyped by mass spectrometry by measuring the differences in the mass of nucleic acids having alternative SNP alleles. Matrix Assisted Laser Desorption Ionization-Time of Flight (MALDI-TOF) mass spectrometry technology can be used for extremely precise determinations of molecular mass such as SNPs (Wise et al. (2003) Rapid Commun. Mass Spectrom. 17:1195-1202). Numerous approaches to SNP analysis have been developed based on mass spectrometry. Some mass spectrometry-based methods of SNP genotyping include primer extension assays, which can also be utilized in combination with other approaches, such as traditional gel-based formats and microarrays.

[0038] SNPs also can be scored by direct DNA or RNA sequencing. A variety of automated sequencing procedures can be utilized, including sequencing by mass spectrometry (see, e.g., Int'l Patent Application Publication No. WO 94/16101; Cohen et al. (1996) Adv. Chromatogr. 36:127-162; Griffin et al. (1993) Appl. Biochem. Biotechnol. 38:147-159). The nucleic acid sequences of the present invention enable one of ordinary skill in the art to design sequencing primers for such automated sequencing procedures. Commercial instrumentation, such as the analyzers supplied by Applied Biosystems, is commonly used in the art for automated sequencing.

[0039] Sequence-specific ribozymes (see, e.g., U.S. Pat. No. 5,498,531) also can be used to score SNPs based on the development or loss of a ribozyme cleavage site. Perfectly matched sequences can be distinguished from mismatched sequences by nuclease cleavage digestion assays or by differences in melting temperature. If the SNP affects a restriction enzyme cleavage site, the SNP can be identified by alterations in restriction enzyme digestion patterns, and the corresponding changes in nucleic acid fragment lengths determined by gel electrophoresis. In some assays, the size of the amplification product is detected and compared to the length of a control sample. For example, deletions and insertions can be detected by a change in size of the amplified product compared to a control genotype.

[0040] In further embodiments, the present invention provides methods for predicting success in nicotine cessation in a subject using a nicotine replacement source and/or an antidepressant. The methods include detecting a SNP in one or more (e.g., 2, 3, 4, 5, 10, 15, 20, 25, 30, 40, 50, 60, 70, 80, 90, 100, 150, 200, 250, 300, 350, 400, 450, 500, 550, 600, 650, 700, 750, 800, 850, 900, 950, 1000 or any number in-between) nucleotide sequences set forth in SEQ ID NOs:1-14724 as disclosed in the nucleotide sequences set forth in SEQ ID NOs:1-14724 in the nucleic acid complement of the subject (see, Table 1). In a non-limiting example, the nucleotide sequences can be at least twenty or more of the nucleotide sequences set forth in SEQ ID NOs:1-14724. The presence of the SNP is correlated with an increased rate of success in nicotine cessation in a subject using the nicotine replacement source and/or the antidepressant.

[0041] By “nicotine replacement source” is intended a source of nicotine separate or apart from tobacco (e.g., an isolated and/or purified source of nicotine). An exemplary nicotine replacement source is a nicotine patch (e.g., Habitrol™, Nicoderm CQ™ and Nicotrol™) which releases a constant amount of nicotine into the body. Unlike nicotine in tobacco smoke, which passes rapidly into the blood through the lining of the lungs, nicotine in a nicotine patch takes about an hour to pass through the layers of skin and into the subject's blood. An additional nicotine replacement source is nicotine gum (e.g., Nicorette™ gum), which delivers nicotine to the brain more quickly than a patch. However, unlike the nicotine in tobacco smoke, the nicotine in the gum takes several minutes to reach the brain, making the “hit” less intense with the gum than with a cigarette. Yet another nicotine replacement source is a nicotine lozenge (e.g., Commit™ lozenge), which comes in the form of a hard candy and releases nicotine as it slowly dissolves in the mouth of a subject.

[0042] A nicotine nasal spray (e.g., Nicotrol™ nasal spray) is another example of a nicotine replacement source. Nicotine nasal spray, dispensed from a pump bottle similar to over-the-counter decongestant sprays, relieves cravings for a cigarette, as the nicotine is rapidly absorbed through the nasal membranes and reaches the bloodstream faster than any other nicotine replacement therapy (NRT) product. Yet another example of a nicotine replacement source is a nicotine inhaler (e.g., Nicotrol™ inhaler), which generally consists of a plastic cylinder containing a cartridge that delivers nicotine when a subject puffs on it. Although similar in appearance to a cigarette, a nicotine inhaler delivers nicotine into the mouth, not the lungs, and the nicotine enters the body much more slowly than the nicotine in tobacco smoke. The term “antidepressant” includes bupropion hydrochloride (e.g., Zyban™ or Wellbutrin™)

[0043] In addition, the present invention pertains to a method for identifying a subject with an increased risk of becoming dependent on an addictive substance, including detecting a SNP in one or more (e.g., 2, 3, 4, 5, 10, 15, 20, 25, 30, 40, 50, 60, 70, 80, 90, 100, 150, 200, 250, 300, 350, 400, 450, 500, 550, 600, 650, 700, 750, 800, 850, 900, 950, 1000 or any number in-between) nucleotide sequences set forth in SEQ ID NOs:1-14724 in a nucleic acid complement of the subject (see, Table 1). In a non-limiting example, the nucleotide sequences can be at least twenty or more of the nucleotide sequences set forth in SEQ ID NOs:1-14724. The presence of the SNP is correlated with an increased risk of becoming dependent on the addictive substance.

[0044] By an “increased risk” of becoming dependent on an addictive substance is intended a subject that is identified as having a higher than normal chance of developing a dependency to an addictive substance, compared to the general population. The term “becoming dependent” (i.e., on or to an addictive substance) refers to exhibiting dependence or dependency, a state in which there is a compulsive or chronic need for the addictive substance. Thus, a subject dependent on an addictive substance exhibits compulsive use of the substance despite significant problems resulting from such use. Hallmarks of dependency include, but are not limited to, taking a substance longer or in larger amounts than planned, repeatedly expressing a desire or attempting unsuccessfully to cut down or regulate use of a substance, continuing use in the face of acknowledged substance-induced physical or mental problems, tolerance and withdrawal.

[0045] Furthermore, the present invention provides methods for developing an individualized treatment regimen for addictive substance cessation in a subject dependent on an addictive substance, including detecting a SNP in one or more (e.g., 2, 3, 4, 5, 10, 15, 20, 25, 30, 40, 50, 60, 70, 80, 90, 100, 150, 200, 250, 300, 350, 400, 450, 500, 550, 600, 650, 700, 750, 800, 850, 900, 950, 1000 or any number in-between) nucleotide sequences set forth in SEQ ID NOs:1-14724 in a nucleic acid complement of the subject (see, Table 1). In a non-limiting example, the nucleotide sequences can be at least twenty or more of the nucleotide sequences set forth in SEQ ID NOs:1-14724. The presence of one or more SNPs is correlated with an individualized treatment regimen by establishing a genetic association between specific SNPs, the particular addictive substance the subject is dependent on and rates of success in addictive substance cessation in individuals utilizing behavioral modification and/or pharmacological therapy (e.g., replacement therapy). In a non-limiting example, the addictive substance is nicotine. In a further embodiment, the subject presently is dependent on an addictive substance (e.g., nicotine).

[0046] In a further embodiment, the present invention provides isolated nucleic acid molecules that contain one or more SNPs (e.g., 2, 3, 4, 5, 10, 15, 20, 25, 30, 40, 50, 60, 70, 80, 90, 100, 150, 200, 250, 300, 350, 400, 450, 500, 550, 600, 650, 700, 750, 800, 850, 900, 950, 1000 or any number in-between), as disclosed in the nucleotide sequences set forth in SEQ ID NOs:1 to 14724. Isolated nucleic acid molecules containing one or more SNPs disclosed herein may be interchangeably referred to as “SNP-containing nucleic acid molecules.” The isolated nucleic acid molecules of the present invention also include probes and primers, which can be used for assaying the disclosed SNPs. As used herein, an “isolated nucleic acid molecule” is one that contains a SNP of the present invention, or one that hybridizes to such molecule such as a nucleic acid with a complementary sequence, and is separated from most other nucleic acids present in the natural source of the nucleic acid molecule. Moreover, an “isolated” nucleic acid molecule, such as a cDNA molecule containing a SNP of the present invention, may be substantially free of other cellular material, or culture medium when produced by recombinant techniques, or chemical precursors or other chemicals when chemically synthesized. A nucleic acid molecule can be fused to other coding or regulatory sequences and still be considered “isolated.”

[0047] Isolated nucleic acid molecules may be in the form of RNA, such as mRNA, and include in vivo or in vitro RNA transcripts of the isolated SNP-containing DNA molecules of the present invention. Isolated nucleic acid molecules according to the present invention further include such molecules produced by molecular cloning or chemical synthetic techniques or by a combination thereof (see, e.g., Sambrook & Russell, Molecular Cloning: A Laboratory Manual (Cold Spring Harbor Press, NY 2000).

[0048] Generally, an isolated SNP-containing nucleic acid molecule includes one or more SNP positions disclosed by the present invention with flanking nucleotide sequences on either side of the SNP positions. A flanking sequence can include nucleotide residues that are naturally associated with the SNP site and/or heterologous nucleotide sequences. Generally the flanking sequence is up to about 100, 80, 60, 50, 40, 30, 25, 20, 15, 10, 8, 6 or 4 nucleotides (or any other length in-between) on either side of a SNP position.

[0049] An isolated nucleic acid molecule of the present invention further encompasses a SNP-containing polynucleotide that is the product of any one of a variety of nucleic acid amplification methods, which are used to increase the copy numbers of a polynucleotide of interest in a nucleic acid sample. Such amplification methods are well known in the art and include, but are not limited to, PCR (U.S. Pat. Nos. 4,683,195 and 4,683,202), ligase chain reaction (Wu & Wallace (1989) Genomics 4:560-569; Landegren et al. (1988) Science 241:1077-1080), strand displacement amplification (U.S. Pat. Nos. 5,270,184 and 5,422,252), transcription-mediated amplification (U.S. Pat. No. 5,399,491), linked linear amplification (U.S. Pat. No. 6,027,923), and isothermal amplification methods such as nucleic acid sequence based amplification and self-sustained sequence replication (Guatelli et al. (1990) Proc. Natl. Acad. Sci. USA 87:1874-1878). Based on such methodologies, one of ordinary skill in the art readily can design primers in any suitable regions 5 and 3 to a SNP disclosed herein. Such primers can be used to amplify DNA of any length so long as it contains the SNP of interest in its sequence.

[0050] Furthermore, isolated nucleic acid molecules, particularly SNP detection reagents such as probes and primers, also can be partially or completely in the form of one or more types of nucleic acid analogs, such as peptide nucleic acid (PNA; U.S. Pat. Nos. 5,539,082; 5,527,675; 5,623,049; and 5,714,331). Nucleic acids, especially DNA, can be double-stranded or single-stranded. Single-stranded nucleic acid can be the coding strand (sense strand) or the complementary non-coding strand (anti-sense strand). DNA, RNA, or PNA segments can be assembled, e.g., from fragments of the human genome (in the case of DNA or RNA) or single nucleotides, short oligonucleotide linkers, or from a series of oligonucleotides, to provide a synthetic nucleic acid molecule. Nucleic acid molecules can be readily synthesized using the sequences provided herein as a reference. Furthermore, large-scale automated oligonucleotide/PNA synthesis (including synthesis on an array, or bead surface or other solid support) can be readily accomplished using commercially available nucleic acid synthesizers, such as the Applied Biosystems (Foster City, Calif.) 3900 High-Throughput DNA Synthesizer, and the sequence information provided herein.

[0051] The nucleic acid molecules of the present invention have a variety of uses, such as predicting success in addictive substance cessation in a subject and predicting success in nicotine cessation in a subject using a nicotine replacement source and/or an antidepressant or identifying a subject who has an increased risk of becoming dependent on an addictive substance. Additionally, the nucleic acid molecules are useful as hybridization probes, such as for genotyping SNPs in messenger RNA, cDNA, genomic DNA, amplified DNA or other nucleic acid molecules, and for isolating full-length cDNA and genomic clones as well as their orthologs.

[0052] A probe can hybridize to any nucleotide sequence along the entire length of a nucleic acid molecule provided herein. Generally, a probe of the present invention hybridizes to a region of a target sequence that encompasses a SNP position indicated in Table 1. In some instances, the probe hybridizes to a SNP-containing target sequence in a sequence-specific manner, such that it distinguishes a target sequence from other nucleotide sequences that vary from the target sequence only by the nucleotide present at the SNP site. Such a probe is particularly useful for detecting a SNP-containing nucleic acid in a test sample, or for determining which nucleotide (allele) is present at a particular SNP site (i.e., genotyping the SNP site).

[0053] A nucleic acid hybridization probe can be used for determining the presence, level, form and/or distribution of nucleic acid expression. The nucleic acid whose level is determined can be DNA or RNA. Accordingly, probes specific for the SNPs described herein can be used to assess the presence, expression and/or gene copy number in a given cell, tissue or organism. In vitro techniques for detection of mRNA include, e.g., Northern blot hybridizations and in situ hybridizations. In vitro techniques for detecting DNA include Southern blot hybridizations and in situ hybridizations. Probes can be used as part of a diagnostic test kit for identifying cells or tissues in which a SNP is present, such as by determining if a polynucleotide contains a SNP of interest.

[0054] One of ordinary skill in the art will recognize that, based on the SNP and associated sequence information disclosed herein, detection reagents can be developed and used to assay any SNP of the present invention individually or in combination, and such detection reagents can be readily incorporated into one of the established kit or system formats which are well known in the art. The terms “kits” and “systems,” as used herein in the context of SNP detection reagents, are intended to refer to such things as combinations of multiple SNP detection reagents, or one or more SNP detection reagents in combination with one or more other types of elements or components (e.g., other types of biochemical reagents, containers, packages, such as packaging intended for commercial sale, substrates to which SNP detection reagents are attached, electronic hardware components, and the like). Accordingly, the present invention further provides SNP detection kits and systems, including but not limited to, packaged probe and primer sets (e.g., TaqMan® Probe Primer Sets), arrays/microarrays of nucleic acid molecules, and beads that contain one or more probes, primers, or other detection reagents for detecting one or more SNPs of the present invention. The kits/systems optionally can include various electronic hardware components. For example, arrays (e.g., DNA chips) and microfluidic systems (e.g., lab-on-a-chip systems) provided by various manufacturers typically include hardware components. Other kits/systems (e.g., probe/primer sets) may not include electronic hardware components, but can include, e.g., one or more SNP detection reagents along with other biochemical reagents packaged in one or more containers.

[0055] A SNP detection kit typically also can contain one or more detection reagents and other components (e.g., a buffer, enzymes, such as DNA polymerases or ligases, chain extension nucleotides, such as deoxynucleotide triphosphates, positive control sequences, negative control sequences, and the like) necessary to carry out an assay or reaction, such as amplification and/or detection of a SNP-containing nucleic acid molecule. A kit can further contain means for determining the amount of a target nucleic acid, and means for comparing the amount with a standard, and can include instructions for using the kit to detect the SNP-containing nucleic acid molecule of interest. In one embodiment of the present invention, kits are provided that contain the necessary reagents to carry out one or more assays to detect one or more SNPs disclosed herein. In a non-limiting example, SNP detection kits/systems are in the form of nucleic acid arrays or compartmentalized kits, including microfluidic/lab-on-a-chip systems.

[0056] SNP detection kits/systems may contain, e.g., one or more probes, or pairs of probes, that hybridize to a nucleic acid molecule at or near each target SNP position. Multiple pairs of allele-specific probes can be included in the kit/system to simultaneously assay large numbers of SNPs, at least one of which is a SNP of the present invention. In some kits/systems, the allele-specific probes are immobilized to a substrate, such as an array or bead. For example, the same substrate can comprise allele-specific probes for detecting at least 1, at least 10, at least 100, at least 1000, at least 10,000, or at least 100,000 SNPs. The terms “arrays,” “microarrays” and “DNA chips” are used herein interchangeably to refer to an array of distinct polynucleotides affixed to a substrate such as glass, plastic, paper, nylon, or other type of membrane, filter, chip or any other suitable solid support. The polynucleotides can be synthesized directly on a surface of the substrate, or synthesized separate from the substrate and then affixed to the substrate's surface.

[0057] The following experimental examples are offered by way of illustration and not by way of limitation.

### EXAMPLES

### Example 1

### Molecular Genetics of Nicotine Dependence and Abstinence

[0058] A 520,000 SNP genome wide association in pools of DNA prepared from nicotine dependent European-American smoking cessation trial participants and control individuals was performed. Genotypes from the entire group of nicotine dependent research participants were compared to genotypes from European-American research volunteers free from any substantial lifetime use of any addictive substance. See, Uhl et al. (2007) BMC Genet. 8:10, incorporated herein by reference as if set forth in its entirety.

[0059] Experimental Subjects

[0060] Study participants of self-reported European ancestry recruited in the Raleigh-Durham metropolitan area by advertising and word of mouth provided informed consents for studies of smoking cessation, averaged age 44 and were 45% female. These participants reported an average of 25 years of smoking, displayed initial Fagerstrom Test for Nicotine Dependence (FTND; Heatherton et al. (1991) Br. J. Addict. 86:1119-1127) scores that averaged 6.4 and provided screening carbon monoxide levels that averaged 34.7.

[0061] Participants received oral mecamylamine (10 mg/day) and either active (21 mg/24 hours) or placebo nicotine skin patches for two weeks before the target quit-smoking date. After the quit-date, participants were randomly assigned to groups that received mecamylamine (10 mg/day) versus matching placebo and 21 mg/24 hours versus 42 mg/24 hours nicotine skin patch doses to test how mecamylamine might improve effectiveness of nicotine replacement therapy. Behavioral support and self-help quitting manuals were also provided. Fifty-five study participants reported continuous abstinence from smoking when assessed six weeks after the quit date. Seventy-nine participants were not abstinent at the six week time point. Data from these individuals was compared to data from 320 control study participants of self-reported European-American ancestry recruited in Baltimore by advertising and word of mouth who also provided informed consents, averaged age 31, were 36% female and reported no substantial lifetime histories of use of any addictive substance (Uhl et al. (2001) Am. J. Hum. Genet. 69:1290-1300; Smith et al. (1992) Arch. Gen. Psychiatry 49:723-727; and Persico et al. (1996) Biol. Psychiatry 40:776-784).

[0062] DNA Preparation, Pooling and Analysis

[0063] Genomic DNA was prepared from blood (Uhl et al. (2001), supra; Smith et al., supra; and Persico et al., supra), carefully quantified and combined into pools representing 13-20 individuals of the same ethnicity and phenotype. Hybridization probes were prepared from the genomic DNA pools according to the manufacture's instructions (Affymetrix Genechip Mapping Assay Manual; Affymetrix; Santa Clara, Calif.) with precautions to avoid contamination that included use of dedicated preparation rooms and hoods. Fifty nanograms of each pooled genomic DNA was digested by StyI or by NspI, ligated to appropriate adaptors and amplified using a GeneAmp PCR System 9700 (Applied Biosystems) with a 3 minute 94° C. hot start, 30 cycles of 30 seconds at 94° C., 45 seconds at 60° C., 15 seconds at 68° C., and a final 7 minute 68° C. extension. PCR products were purified (MinElute™ 96 UF kits, Qiagen; Valencia, Calif.). Polymerase chain reaction products were quantified, and 40 μg was digested for 35 minutes at 37° C. with 0.04 unit/μl DNase I. The 30-100 bp fragments resulting from DNase treatments were end-labeled using terminal deoxynucleotidyl transferase and biotinylated dideoxynucleotides and hybridized to the appropriate StyI or NspI early access Mendel® Microarrays (Affymetrix). Arrays were stained, washed and scanned according to the manufacture's instructions (Affymetrix Genechip Mapping Assay Manual) using immunopure strepavidin (Pierce, Milwaukee, Wis.), biotinylated antistreptavidin antibody (Vector Labs, Burlingame, Calif.) and R-phycoerythrin strepavidin (Molecular Probes, Eugene, Oreg.). Fluorescence intensities were quantitated using an Affymetrix array scanner as described by Uhl et al. (Uhl et al. (2001), supra).

[0064] Identification of Positive SNPs

[0065] Allele frequencies for each SNP in each DNA pool were assessed based on hybridization to the 12 “perfect match” cells on each of four arrays from replicate experiments, as described by Liu et al. (Lui et al. (2006) Am. J. Med. Genet. B Neuropsychiatr. Genet. 141:918-925) and Johnson et al. (Johnson et al. (2006) Am. J. Med. Genet. B Neuropsychiatr. Genet. 141:844-853). Briefly, each cell's value was analyzed by subtracting background fluorescence intensities and normalizing background-subtracted values to the values for the highest intensities on each array. The data from the 12 perfect match cells for A and B alleles for each SNP were averaged. To facilitate comparison of data from multiple arrays, the arctangent of the ratio between hybridization intensities for A and B alleles for each array was derived. These arctan AB values for the four replicate arrays that assessed genotype frequencies for each pool were then averaged. The mean arctan A/B ratios for nicotine dependent versus control individuals (and for quitters versus nonquitters) were then calculated. The mean arctan A/B ratio for abusers (or quitters) was then divided by the mean arctan A/B ratio for controls (or nonquitters) to form abuser/control (or quitter/nonquitter) ratios. A “t” statistic for the differences between abusers and controls or quitters and nonquitters was then generated (Liu et al. (2005) Proc. Natl. Acad. Sci. USA 102:11864-11869; Liu et al. (2006), supra; Johnson et al. (2006), supra). “Nominally significant” SNPs displayed t values with p<0.005 for nicotine dependent versus control comparisons and p<0.01 for quitter versus nonquitter comparisons, respectively. A relatively strict preplanned criterion for the first comparison that confirms genes with good confidence was thus set. A more modest criterion, with lower levels of confidence, was set for the second comparison that nominates genes that merit replication studies. Data from SNPs on sex chromosomes and SNPs whose chromosomal positions could not be adequately determined using Mapviewer (NCBI, build 35.1) or NETAFFYX (Affymetrix) were deleted.

[0066] Nicotine Dependence Variants

[0067] In preplanned assessments of the allelic variants likely to influence vulnerability to dependence on nicotine and other addictive substances, autosomal SNPs that provided convergent data with four additional abuser versus comparisons datasets were focused on. That is, SNPs that a) displayed t values with p <0.005 nominal significance in comparisons between European-American controls versus nicotine dependent research participants; b) identified genes that also displayed reproducibly-positive associations with addiction vulnerabilities in data from four other samples: i) National Institute on Drug Abuse (NIDA) African-American and European-American polysubstance abuser versus control comparisons based on 639,401 SNP comparisons with the requirement that both samples provide nominally significant results (p<0.0025 for the joint probability) and clustering so that at least three such SNPs lay within 100 Kb of each other (Liu et al. (2006), supra); ii) Japanese Genetic Investigations of Drug Abuse (JGIDA) Japanese methamphetamine abuser versus control comparisons, based on a requirement for nominal significance (p<0.05) of SNPs lying within the same genes; and iii) Collaborative Study on the Genetics of Alcoholism (COGA) alcohol dependent versus control comparisons, based on a requirement for nominal significance (p<0.05) of SNPs lying within the same genes (Johnson et al. (2006), supra); and c) produced an enhanced (e.g., lower) Monte Carlo p value for the overall association in comparisons of the smoker/control data with the four other sample sets versus the Monte Carlo p values for the data from the four other sample sets alone.

[0068] Each of the Monte Carlo simulation trials began with sampling from a database that contained the results from the smoker/control study and results from a larger database that contained data from the prior association studies in the four additional samples noted herein to which the smoker/control results were compared. For each of these 100,000 simulation trials, a randomly-selected set of SNPs was chosen and the same procedure that had been followed for the actual data was run. The number of trials for which the results from the randomly-selected set of SNPs matched or exceeded the results actually observed from the SNPs identified in the smoker/control study was tabulated. Empirical p values were calculated by dividing the number of trials for which the observed results were matched or exceeded by the total number of Monte Carlo simulation trials performed. Since this method examines the properties of the SNPs in the smoker/control dataset, assuming independence of their allele frequencies, it is relatively robust despite the uneven distribution of Affymetrix SNP markers across the genome.

[0069] Quit Success Variants

[0070] In comparing results related to successful abstinence, less stringent criteria were used. The focus was on autosomal SNPs that displayed three features: 1) they displayed t values with p<0.01 nominal significance in the dataset of successful versus unsuccessful quitters; 2) they lay within clusters of at least three such nominally positive SNPs so that each positive SNP lies within 0.1 Mb of the nearest positive SNP; and 3) they lay within genes whose functions can be inferred. These observed results were also compared to those expected by chance, based on independence of SNP allelic frequency estimates under the null hypothesis, using 10,000-100,000 Monte Carlo simulation trials on the database from the study's results, as noted herein (Uhl et al. (2001), supra).

[0071] Statistical Power

[0072] To assess the power of the present approach, the observed standard deviations and mean abuser/control differences for the SNPs that provided the largest differences between control and abuser population means were used, with the program PS (v2.1.31; Dupont & Plummer (1990) Control Clin. Trials 11:116-128) and α=0.05.

[0073] Control Comparisons

[0074] To provide a control for the possibility that the user/control and abstainer/nonabstainer differences observed at some of the clustered, reproducibly-positive SNPs were due to occult ethnic/racial differences in the frequencies of alleles at these same SNPs between abusers and controls or between abstainers and nonabstainers, the present results were compared with those that have previously been obtained from comparisons of allele frequency data in self-reported African-American versus European-American control individuals, focusing on SNPs that display ethnicity difference scores that lie in the outlying +/−2.5% of all differences.

[0075] To provide a control for the possibility that the abuser-control differences observed at many of the clustered, reproducibly-positive SNPs were due to noisy assays for these SNPs, the overlap between the clustered positive SNPs and the 2.5% of SNPs which display the largest variation between pools in data from this and other studies using the same arrays were examined

[0076] Results

[0077] Single nucleotide polymorphism allele frequency assessments displayed modest variability. Standard errors for the variation among the four replicate studies of each DNA pool were +/−0.035. Standard error for the variation among the pools studied for each phenotype group was +/−0.028. Previous validating studies for these arrays have also revealed good fits between individual and pooled genotyping, with 0.95 correlations between pooled and individually-determined genotype frequencies. The observed pool-to-pool standard deviations from these datasets thus indicate 0.94 and 1.0 power to detect 5 and 10% allele frequency differences with α=0.05 in nicotine dependent versus control comparisons and 0.45 and 0.95 power to detect 5 and 10% allele frequency differences in successful versus unsuccessful quitters.

[0078] When allele frequencies in 134 nicotine dependent versus 320 control individuals were compared, 88,937 of the 520,000 tested SNPs displayed t values that provided nominally-significant abuser versus control allele frequency differences at p<0.005. These nominally-positive SNPs are positioned near clustered-positive SNPs from four other abuser-control comparisons to extents that are greater than expected by chance. 4701 of these nominally-significant SNPs lay within 100 Kb of a cluster of nominally-positive SNPs from replicate African-American and European-American NIDA polysubstance abuser versus control comparisons. Monte Carlo p values for this convergence were 0.0002. Thus, only 2 of 10,000 Monte Carlo simulation trials that each began by selecting 88,937 random SNPs displayed so many nominally-significant results near the clustered positive results from the two NIDA samples. 2133 of the nominally-significant SNPs from the nicotine dependent versus control comparison met several criteria. They lay near clusters of positive SNPs from both NIDA samples; they lay within annotated genes; they lay within genes that are also supported by nominally-positive results from JGIDA methamphetamine abuser versus control comparisons; and they lay within genes that are also supported by nominally-positive results from COGA alcohol dependent versus control comparisons. The Monte Carlo p value for the observed degree of convergence between the nicotine and prior data was 0.018.

[0079] The results of the nicotine dependent versus control comparisons showed that allelic variants in a number of genes contribute to individual differences in vulnerability to nicotine dependence (Table 1). Genes identified include genes related to cell adhesion processes (e.g., CNTN6, LRRN1, SEMA3C, CSMD1, PTPRD, LRRN6C, and CDH13), genes related to enzymatic activity (e.g., SIPA1L2, PDE1C, PDE4D, and PRKG1), genes encoding G-protein coupled receptors (e.g., the GRM7 metabotropic glutamate receptor, the orphan GPR154 receptor and the HRH4 histamine receptor), genes involved in protein processing, transcriptional regulation genes, transporter-associated genes, ion channel genes, and structural genes.

LENGTHY TABLES
The patent application contains a lengthy table section. A copy of the table is available in electronic form from the USPTO web site (http://seqdata.uspto.gov/?pageRequest=docDetail&DocID=US20110294680A1). An electronic copy of the table will also be available from the USPTO upon request and payment of the fee set forth in 37 CFR 1.19(b)(3).

[0080] Controls for occult stratification among the tested subjects and poor technical quality in the nominally-positive SNPs identified failed to provide alternative explanations for the positive results of comparisons between smokers and controls. Only 837 of the nominally-positive SNPs from the smoker-control comparisons displayed large allele frequency differences between European- and African-American control individuals. This number was smaller than the 2,223 SNPs that would be expected to have such properties if they were selected by chance. Only 158 of the nominally-positive SNPs from the smoker-control comparisons in these data lay among the SNPs that displayed the largest variation between pools in data from this and other studies using the same arrays. This number was also smaller than chance values. These comparisons thus fail to support the alternative hypotheses that either occult ethnic stratification in these samples or technical problems with assays for these SNPs provided the basis for the overall results.

[0081] In comparing data from successful versus unsuccessful quitters, 4,570 SNPs were identified whose allele frequencies differ between these two groups with t values for these differences that yield nominal p values<0.01. The nominally-positive SNPs from comparisons between successful versus unsuccessful quitters clustered together to extents much greater than expected by chance if their allelic frequencies were independent of each other (Monte Carlo p<0.00001). 944 of the 4,570 nominally-positive SNPs lay in 224 clusters in which each positive SNP lay within 100 Kb of at least one other positive SNP. Such clustering would be anticipated if many of these reproducibly-positive SNPs identified haplotypes that were present in different frequencies in the samples of successful versus unsuccessful quitters, but not if they represented chance independent observations. Clusters were defined as chromosomal sites where: 1) three or more reproducibly-positive SNPs were positioned within 0.1 Mb of each other and 2) reproducibly-positive SNPs assessed by two different array types were represented, so that all positive data did not come from just NspI or StyI arrays. The nominally-positive SNPs from successful versus unsuccessful quitter comparisons that clustered together on small chromosomal regions also clustered together in regions that are annotated as genes to extents much greater than chance if they represented independent observations (Monte Carlo p<0.00001 for both).

[0082] Controls for occult stratification among the tested subjects and poor technical quality in the nominally-positive SNPs identified failed to provide alternative explanations for the positive results of comparisons between successful and unsuccessful quitters. The SNPs that displayed the largest allele frequency differences between European- and African-American controls and the SNPs that displayed the largest between-pool variances did not overlap with those that distinguished successful versus unsuccessful quitters at levels significantly larger than those anticipated by chance (131 versus 114 and 143 versus 114, respectively).

### Example 2

### Molecular Genetics of Successful Smoking Cessation

[0083] Convergent genome-wide association studies of European-American participants in smoking cessation clinical trials from three centers were undertaken to identify replicated quit success genes. Genotypes from the participants who successfully abstained from smoking in a clinical smoking cessation trial were compared to genotypes from the participants who were unsuccessful (i.e., relapsed) in abstaining from smoking. See, Uhl et al. (2008) Arch Gen Psychiatry. 65:683-693, incorporated herein by reference as if set forth in its entirety.

[0084] Experimental Subjects

[0085] European American smokers responded to newspaper, flyer and television advertisements and/or to physician referrals for help in quitting smoking (Lerman et al. (2006) Neuropsychopharmacology 31:231-242; Liu et al. (2006), supra; David et al. (2007) Nicotine Tob. Res. 9:821-833). Subjects were 18-65 years of age, provided informed consents, were not pregnant or lactating, had no DSM-IV Axis I psychiatric disorder, reported no current use of treatment medications (e.g., bupropion or nicotine-containing products other than cigarettes) and described no contraindications for use of these medications. Individuals who were dependent on other addictive substances, current users of psychotropic medications and those diagnosed with cancer in the past 6 months were excluded. Subjects were enrolled in one of four randomized clinical trials for smoking cessation.

[0086] Sample I: (a) Double-blind placebo controlled trial of bupropion 300 mg/day or matching placebo for 10 weeks, or (b) open label trial of nicotine nasal spray versus nicotine patch for 8 weeks (Lerman et al. (2006), supra). Smoking status was assessed by telephone interview 0, 8 and 24 weeks after the targeted quit date using validated timeline follow-back methods (Brown et al. (1998) Psych. Add. Behav. 12:101-112). Abstinence was also assessed by measuring cotinine <15 ng/ml (bupropion trial) or CO (NRT trial). One hundred twenty-six individuals with biochemically-confirmed abstinence for at least the 7 days prior to both a) the end of treatment (8 weeks) and b) 24 week assessments were contrasted with 140 unsuccessful quitters who were not abstinent at either time point. Sample I was 55% female, averaged 45 years of age, reported smoking an average of 21 cigarettes/day and displayed FTND scores that averaged 5.4 prior to treatment. Eighty-nine percent described at least one prior effort to quit smoking.

[0087] Sample II: Clinical effectiveness study of NRT. Participants received either active 21 mg/day or placebo nicotine skin patches for two weeks before the targeted quit date. Participants also received mecamylamine 10 mg/day per os (po), prior to the target quit-smoking date in order to attenuate reinforcing effects of cigarette smoking. After the quit-date, participants were randomly assigned to groups that received mecamylamine 10 mg/day versus matching placebo and 21 mg/24 hours versus 42 mg/24 hours nicotine skin patch doses. Fifty-five individuals reported continuous abstinence from smoking when assessed 6 weeks after the quit date with CO confirmation, 79 were not abstinent. Sample II was 48% female, averaged 44 years of age, reported smoking an average of 30 cigarettes/day with FTND scores averaging 6.4 prior to treatment. Most of these individuals reported at least one prior quit attempt; there was an average of 4.4 quit attempts (Liu et al. (2006), supra).

[0088] Sample III: Double-blind placebo controlled trial of bupropion 300 mg or matching placebo for 10 weeks. Participants received 10 weeks of either placebo or bupropion (150 mg/day for the first 3 days, then 300 mg/day) with a target quit date one week following initiation of drug or placebo (David et al. (2007), supra). Smoking cessation was assessed using point abstinence, defined by self reports and saliva cotinine levels ≦15 ng/ml. Sixty individuals with biochemically-confirmed abstinence for at least the 7 days prior to both the end of treatment and 24 week assessments were contrasted with 90 unsuccessful quitters who were not abstinent at either time point. Sample III was 51% female, averaged 45 years of age, reported smoking an average of 25 cigarettes/day with FTND scores of 7.5 prior to treatment. Most of these individuals reported at least one prior quit attempt; there was an average of 5 quit attempts.

[0089] DNA Preparation, Pooling and Analysis

[0090] Genomic DNA was prepared from blood, carefully quantitated, combined into pools representing 13-20 quitter or nonquitter subjects, and analyzed as described by Uhl et al. (Am. J. Hum. Genet. 69:1290-1300, 2001). Allele frequencies for each SNP in each DNA pool were assessed based on hybridization to the “perfect match” cells from replicate experiments, as described by Liu et al. (2006), supra; and Johnson et al. (2006), supra). A “t” statistic for the differences between quitters and nonquitters was then generated (Liu et al. (2005) Proc. Natl. Acad. Sci. USA 102:11864-11869; Liu et al. (2006), supra; and Johnson et al. (2006), supra. “Nominally positive” SNPs displayed t values with p<0.01. Analyses focused on nominally-positive SNPs that clustered in small chromosomal regions in at least two samples, since this pattern of results would not be anticipated by chance but would be anticipated if haplotype blocks that contained multiple SNPs were present at differing frequencies in successful versus unsuccessful quitters.

[0091] Monte Carlo p values for the clustering of nominally-positive SNPs from one sample that lie within annotated genes and the convergence between these clusters and the data from at least one other sample were calculated based on 100,000 or 10,000 simulation trials. Each trial sampled a random set of SNPs from the database that contains the results from these studies and applied the same procedure that had been followed for the actual data analysis. The number of trials for which the results from the randomly-selected set of SNPs matched or exceeded the results actually observed from the SNPs identified in the instant study was tabulated. Empirical p values were calculated by dividing the number of trials for which the observed results were matched or exceeded by the total number of Monte Carlo simulation trials performed. This method examines the properties of the SNPs in the current dataset and thus should be relatively robust despite the uneven distribution of Affymetrix SNP markers across the genome, the slightly different complement of SNPs represented on the early access and commercial versions of the arrays, and the differing criteria for clustering applied to the larger Sample I and smaller Samples II and III.

[0092] Statistical power was estimated using the observed standard deviations and mean abuser/control differences from each sample, the program PS v2.1.31 (Dupont & Plummer (1990), supra) and α=0.05.

[0093] Controls for the possibility that quitter/non-quitter differences were due to occult ethnic differences or noisy assays compared the clustered SNPs that displayed nominally-positive results in the instant study to SNPs that displayed a) the largest differences among previously-studied African-American versus European-American control individuals, b) the largest differences among subsets of self-reported Caucasian control individuals recruited from different sites within the United Kingdom or c) the largest variation between pools in data from this and other studies that used the same arrays (see, Liu et al. (2006), supra).

[0094] Secondary analyses pooled data from placebo, bupropion and nicotine replacement-treated individuals from all three samples. For each SNP, t values for allele frequency differences between quitters versus nonquitters in bupropion versus placebo and NRT versus placebo comparisons were plotted. While there is no single statistical approach to such data, SNPs were sought that displayed nominally to highly significant impact on responses to at least one of these treatments, and were divided into those SNPs that displayed bupropion-selective, nicotine-replacement selective or nonselective effects. Single nucleotide polymorphisms that displayed t values corresponding to p<0.005 for NRT (t>3.69), bupropion (t>3.58) or both were identified.

[0095] The differences between the t values for NRT versus placebo and the t values for the differences between bupropion versus placebo for each SNP were calculated. The ⅓ of SNPs for which t values for NRT provided the largest positive differences from those for bupropion were defined as “NRT specific,” while the ⅓ of SNPs for which t values for nicotine replacement were similar to those for bupropion were defined as “nonspecific” and the ⅓ of SNPs for which t values for bupropion provided the largest positive differences from those for NRT were defined as “bupropion specific.” The genes that were identified by at least two SNPs were then tallied.

[0096] Results

[0097] There was modest variability in the allele frequency assessments that were based on hybridization to the “perfect match” cells on each of four arrays for DNA from each pool (Liu et al (2006), supra; Johnson et al. (2006), supra). Standard errors (SEMs) for the variation among the four replicate studies of each DNA pool were +/−0.037 for sample I, +/−0.035 for sample II and +/−0.048 for sample III. Standard errors for the variation among the pools studied for each phenotype group were +/−0.029 for sample I, +/−0.028 for sample II and +/−0.34 for sample III. These results support modest variation and are consistent with validation studies that reveal 0.95 correlations between pooled and individually-determined genotype frequencies using these arrays (Uhl et al. (2001), supra; Liu et al. (2005), supra; Liu et al. (2006), supra; Bang-Ce et al. (2004) Anal. Biochem. 333:72-78; Sham et al. (2002) Nat. Rev. Genet. 3:862-871; and Hinds et al. (2004) Hum. Genomics 1:421-434). Based on these variances, the power to detect 5% and 10% allele frequency differences was 0.71/0.45/0.46 and 0.99/0.95/0.96 in samples I, II and III, respectively.

[0098] In comparing data from successful versus unsuccessful quitters from samples I, II and III, 5,411, 4,539 and 4,894 SNPs were identified whose allele frequencies differed between these two groups with nominal p values<0.01. The nominally-positive SNPs from comparisons between successful versus unsuccessful quitters in each of these samples cluster together to extents much greater than expected by chance if their allelic frequencies were independent of each other (Monte Carlo p<0.00001). For Sample I, 1,434 of these 5,411 nominally-positive SNPs, lay in 308, 820 and 861 clusters in which each positive SNP lay within 0.1 Mb of at least two other positive SNPs with representation from SNPs on both array types. For Samples II and III, 2,258 of the 4,539 nominally-positive SNPs and 2,184 of the 4,894 nominally-positive SNPs lay in 820 and 861 clusters in which each positive SNP lay within 0.1 Mb of at least one other positive SNP.

[0099] Controls for occult stratification among the tested subjects and poor technical quality in the nominally-positive SNPs identified failed to provide alternative explanations for the positive results of comparisons between successful versus unsuccessful quitters. Neither SNPs that display the largest allele frequency differences between European- and African-American controls in previous assessments, SNPs that display the largest allele frequency differences between self-reported Caucasian United Kingdom samples, nor SNPs that display the largest between-pool variances in the current dataset overlap with those that distinguish successful versus unsuccessful quitters at levels larger than those anticipated by chance (40 versus 135, 0 versus 0 and 103 versus 105 for Sample I; 39 versus 114, 0 versus 0 and 115 versus 120 for Sample II and 35 versus 122, 0 versus 0 and 112 versus 95 for Sample III).

[0100] Table 1 includes genes where three or more (Sample I) or two or more (Samples II and III) nominally-positive SNPs cluster and clustered nominally-positive SNPs from at least one other sample are also present. Nominally-positive clustered SNPs from successful versus unsuccessful quitter comparisons from Samples I-III thus cluster together on small chromosomal regions to extents much greater than chance. The Monte Carlo p values for the replication/convergence for samples I and II, I and III and II and III are 0.00054, 0.0016 and 0.00063, respectively. Table 1 thus includes SNPs that display t values with p<0.01 in comparing successful versus unsuccessful quitters; cluster, so that at least three such SNPs on at least two array types (Sample I) or at least two such SNPs (Samples II and III) lie within 0.1 Mb of each other; identify annotated genes; and identify genes that contain clustered SNPs with p<0.01 in at least one other sample.

[0101] Eight, 23, 29, and 61 genes were identified by clustered positive SNPs that came from Samples I, II and III, I and II, I and III, and II and III, respectively. Monte Carlo p=0.0003 for this overall convergence. Twenty-one of the genes relate to cell adhesion, 24 are enzymes, 14 regulate transcription. Six encode receptors, 6 encode channels, 3 encode transporters and 4 encode receptor ligands. Two genes are involved with RNA processing, 2 with protein processing, 5 with intracellular signaling, 9 with cell structure, and 9 with unknown functions. Chromosomal regions not currently annotated as containing genes were found that contain at least two clustered nominally positive SNPs (within 0.1 Mb of each other) from at least two of the three samples described (Table 1).

[0102] In a secondary analysis, data from successful versus unsuccessful quitters from the groups treated with bupropion, NRT or placebo from all three centers were combined. The distribution oft values for the differences between bupropion versus placebo and the differences between NRT versus placebo indicate that some SNPs identify gene variants that do not influence responses to each of these treatments in the same way. Single nucleotide polymorphisms that displayed t values corresponding to p<0.005 for nicotine replacement, bupropion or both were identified and the differences between the t values for NRT versus placebo and the t values for the differences between bupropion versus placebo for each SNP were calculated. The ⅓ of SNPs for which t values for NRT provided the largest positive differences from those for bupropion were considered “NRT specific,” the 1/3 of SNPs for which t values for NRT were similar to those for bupropion were considered “nonspecific” and the ⅓ of SNPs for which t values for bupropion provided the largest positive differences from those for nicotine replacement were considered “bupropion specific.” Genes that were identified by at least two SNPs in these groups are included in Table 1. SNPs in the 41 “NRT specific,” 66 “nonspecific” and 26 “bupropion specific” genes had mean t values of 4.28 versus 1.71, 3.58 versus 2.67 and 1.71 versus 4.28 for NRT versus bupropion, respectively. Bupropion- and NRT-selective SNPs each clustered in small chromosomal regions with Monte Carlo p<0.00001.

[0103] All publications and patent applications mentioned in the specification are indicative of the level of those skilled in the art to which this invention pertains. All publications and patent applications are herein incorporated by reference to the same extent as if each individual publication or patent application was specifically and individually indicated to be incorporated by reference.

[0104] Although the foregoing invention has been described in some detail by way of illustration and example for purposes of clarity of understanding, it will be obvious that certain changes and modifications may be practiced within the scope of the appended claims.

1. A method for predicting success in addictive substance cessation in a subject comprising, detecting a single nucleotide polymorphism (SNP) in at least twenty nucleotide sequences set forth in SEQ ID NOs:1-14724 in a nucleic acid complement of said subject, wherein the presence of said SNP is correlated with an increased rate of success in addictive substance cessation.

2. The method of claim 1, wherein said addictive substance is selected from the group consisting of nicotine, alcohol, marijuana, cocaine, heroin, methamphetamine, ketamine, Ecstasy, oxycodone, codeine, morphine and combinations thereof.

3. The method of claim 1, wherein said addictive substance is nicotine.

4. The method of claim 1, wherein said subject presently is dependent on an addictive substance.

5. The method of claim 4, wherein said subject presently is dependent on nicotine.

6. The method of claim 1, in which detection of said SNP is carried out by a process selected from the group consisting of allele-specific probe hybridization, allele-specific primer extension, allele-specific amplification, sequencing, 5′ nuclease digestion, molecular beacon assay, oligonucleotide ligation assay, size analysis, single-stranded conformation polymorphism and combinations thereof.

7. A method for predicting success in nicotine cessation in a subject using a nicotine replacement source comprising, detecting a single nucleotide polymorphism (SNP) in at least twenty nucleotide sequences set forth in SEQ ID NOs:1-14724 in a nucleic acid complement of said subject, wherein the presence of said SNP is correlated with an increased rate of success in nicotine cessation in said subject using said nicotine replacement source.

8. The method of claim 7, wherein said nicotine replacement source is selected from the group consisting of a nicotine patch, a nicotine gum, a nicotine inhaler, or a nasal spray.

9. (canceled)

10. (canceled)

11. A method for predicting success in nicotine cessation in a subject using an antidepressant comprising, detecting a single nucleotide polymorphism (SNP) in one at least twenty nucleotide sequences according to claim 1 in a nucleic acid complement of said subject, wherein the presence of said SNP is correlated with an increased rate of success in nicotine cessation in said subject using said antidepressant.

12. The method of claim 11, wherein said antidepressant is bupropion.

13. A method for identifying a subject who has an increased risk of becoming dependent on an addictive substance, comprising detecting a single nucleotide polymorphism (SNP) in at least twenty nucleotide sequences according to claim 1 in a nucleic acid complement of said subject, wherein the presence of said SNP is correlated with an increased risk of becoming dependent on said addictive substance.

14. The method of claim 13, wherein said addictive substance is selected from the group consisting of nicotine, alcohol, marijuana, cocaine, heroin, methamphetamine, ketamine, Ecstasy, oxycodone, codeine, morphine and combinations thereof.

15. (canceled)

16. The method of claim 13, wherein said subject presently is dependent on an addictive substance.

17. The method of claim 13, in which detection of said SNP is carried out by a process selected from the group consisting of allele-specific probe hybridization, allele-specific primer extension, allele-specific amplification, sequencing, 5′ nuclease digestion, molecular beacon assay, oligonucleotide ligation assay, size analysis, single-stranded conformation polymorphism and combinations thereof.

18. A method for developing an individualized treatment regimen for addictive substance cessation in a subject dependent on an addictive substance comprising, detecting a single nucleotide polymorphisms (SNPs) in at least twenty nucleotide sequences according to claim 1 in a nucleic acid complement of said subject, wherein the presence of said one or more SNPs is correlated with an individualized treatment regimen.

19. The method of claim 18, wherein said addictive substance is selected from the group consisting of nicotine, alcohol, marijuana, cocaine, heroin, methamphetamine, ketamine, Ecstasy, oxycodone, codeine, morphine and combinations thereof.

20. (canceled)

21. The method of claim 18, wherein said subject presently is dependent on an addictive substance.

22. The method of claim 18, in which detection of said SNPs is carried out by a process selected from the group consisting of allele-specific probe hybridization, allele-specific primer extension, allele-specific amplification, sequencing, 5′ nuclease digestion, molecular beacon assay, oligonucleotide ligation assay, size analysis, single-stranded conformation polymorphism and combinations thereof.

23. An isolated nucleic acid molecule comprising at least 25 contiguous nucleotides selected from any one nucleotide sequence set forth in SEQ ID NOs:1 to 14724, or a complement thereof, wherein one of the nucleotides is a single nucleotide polymorphism (SNP).

24. (canceled)

25. A kit for detecting a single nucleotide polymorphism (SNP) in a nucleic acid, comprising the isolated nucleic acid molecule of claim 23.

The application's sequence listing, which the Patent Office published only in electronic form, follows.

SEQUENCE LISTING (14724 sequences)

SEQ ID NO: 1 - DNA, 33 bp, homo sapiens
ccagtgctttcaaccayactcacttttcactgt

SEQ ID NO: 2 - DNA, 33 bp, homo sapiens
acgctgaaacttcatcrccaacgcgccaggagg

SEQ ID NO: 3 - DNA, 33 bp, homo sapiens
cagttttattgcgttcraaaccaagctcgtgcc

SEQ ID NO: 4 - DNA, 33 bp, homo sapiens
atgaggaaacaccttckaccctctgactacttg

SEQ ID NO: 5 - DNA, 33 bp, homo sapiens
tcttattcctggaaaasccgatgcgtttctgaa

SEQ ID NO: 6 - DNA, 33 bp, homo sapiens
aaggacggtggtaaccrgcttctggtggtggag

SEQ ID NO: 7 - DNA, 33 bp, homo sapiens
aggagaggagacatccrgataagagaagataaa

SEQ ID NO: 8 - DNA, 33 bp, homo sapiens
aaggctggggagacaartcataatcatagtggc

SEQ ID NO: 9 - DNA, 33 bp, homo sapiens
taggagatttggccccrccctgcagtgaacagc

SEQ ID NO: 10 - DNA, 33 bp, homo sapiens
ccctttcagtacattcragctgctatggaggaa

SEQ ID NO: 11 - DNA, 33 bp, homo sapiens
gagcacaacatttattsaagtgtttattacttt

SEQ ID NO: 12 - DNA, 33 bp, homo sapiens
gctctgagttcctgggycatcgttctccctgga

SEQ ID NO: 13 - DNA, 33 bp, homo sapiens
tgtgatccaatttttcratacgttgggcaagaa

SEQ ID NO: 14 - DNA, 33 bp, homo sapiens
acaaaggcttcagcaayggttggtggaatgtga

SEQ ID NO: 15 - DNA, 33 bp, homo sapiens
ggatggaaaagtctacycagagctaggcaaact

SEQ ID NO: 16 - DNA, 33 bp, homo sapiens
catgtggaggagagagkccctcaggtcttggtg

SEQ ID NO: 17 - DNA, 33 bp, homo sapiens
ctgaggcttcatgaggwacagaaaaaaggcacc

SEQ ID NO: 18 - DNA, 33 bp, homo sapiens
aaagtagcaattgaaaygatgagaagctaaagg

SEQ ID NO: 19 - DNA, 33 bp, homo sapiens
gagtttgtagattgaaygttccagaagatggca

SEQ ID NO: 20 - DNA, 33 bp, homo sapiens
gaactcagaggaaggcratgcagcggtttctaa

SEQ ID NO: 21 - DNA, 33 bp, homo sapiens
tccagttctcctcaccracgtttcactgatctc

SEQ ID NO: 22 - DNA, 33 bp, homo sapiens
ccaggagcccagcacayaatcgccaagcagcct

SEQ ID NO: 23 - DNA, 33 bp, homo sapiens
aatcgccaagcagcctsaaattcaccaaccaga

SEQ ID NO: 24 - DNA, 33 bp, homo sapiens
tcttgtttgcggttgakgttctgggatcacgtg

SEQ ID NO: 25 - DNA, 33 bp, homo sapiens
caaagtcacagagcccmgaagaggcagcatgtt

SEQ ID NO: 26 - DNA, 33 bp, homo sapiens
gagccaggcctgtaatragaacctcaggaccaa

SEQ ID NO: 27 - DNA, 33 bp, homo sapiens
catgcacctctcctgakaaggaaacagaccctc

SEQ ID NO: 28 - DNA, 33 bp, homo sapiens
tggagagttgatttacrgaacataaccgtcctc

SEQ ID NO: 29 - DNA, 33 bp, homo sapiens
caagtctctgattcacmcgttaaccatgttaaa

SEQ ID NO: 30 - DNA, 33 bp, homo sapiens
ttactgtacagctacaytgattaatataattag

SEQ ID NO: 31 - DNA, 33 bp, homo sapiens
taagtgttcttatacaygtctttttgggcacat

SEQ ID NO: 32 - DNA, 33 bp, homo sapiens
gtcattagtccatggakaaccttttgaaataat

SEQ ID NO: 33 - DNA, 33 bp, homo sapiens
cccaaatagtttgtcaygggcctcctgctgtca

SEQ ID NO: 34 - DNA, 33 bp, homo sapiens
ctcatgtgcacaccccrgctgaggatcccagac

SEQ ID NO: 35 - DNA, 33 bp, homo sapiens
tccccatctataaaacrgggatcacagaacctg

SEQ ID NO: 36 - DNA, 33 bp, homo sapiens
cttattttcctaaggayaagaatacctcgaaac

SEQ ID NO: 37 - DNA, 33 bp, homo sapiens
taaaactatttgccacmatcaagtcggtgaaca

SEQ ID NO: 38 - DNA, 33 bp, homo sapiens
ctcatctgcaaaaagcraagagataacatgatt

SEQ ID NO: 39 - DNA, 33 bp, homo sapiens
ctctcatgccagtgcakaccctactcgttctcc

SEQ ID NO: 40 - DNA, 33 bp, homo sapiens
atgcagccaagtgagckgacatctgactttatc

SEQ ID NO: 41 - DNA, 33 bp, homo sapiens
ctgacacctgcagggckcttgggcacacctaag

SEQ ID NO: 42 - DNA, 33 bp, homo sapiens
caagtagacttggagamcttggtatgaactcac

SEQ ID NO: 43 - DNA, 33 bp, homo sapiens
ttcagaagtagtccagrcattacagaaatccca

SEQ ID NO: 44 - DNA, 33 bp, homo sapiens
cctgtgtgattttacgraacttgtcctgacccg

SEQ ID NO: 45 - DNA, 33 bp, homo sapiens
ccctgtgggggacaacmacaatgtctgttttat

SEQ ID NO: 46 - DNA, 33 bp, homo sapiens
gagacgatgctggtacyctactcagcctgatgc

SEQ ID NO: 47 - DNA, 33 bp, homo sapiens
ctactgggacaaaagcraaaaaatgagaaggaa

SEQ ID NO: 48 - DNA, 33 bp, homo sapiens
gattagaaagcaaagcragaaataaatagggga

SEQ ID NO: 49 - DNA, 33 bp, homo sapiens
ttcacatagccagacamgagaaaccgaatcagc

SEQ ID NO: 50 - DNA, 33 bp, homo sapiens
ttttttaagtaatcagsaatttatttcagtgta

SEQ ID NO: 51 - DNA, 33 bp, homo sapiens
attttattcatctgacrgaggtcttgtatctaa

SEQ ID NO: 52 - DNA, 33 bp, homo sapiens
cagaaatcattagctaraatacagcctccccca

SEQ ID NO: 53 - DNA, 33 bp, homo sapiens
caggtgggtgtcaacaytctcagcttctcccca

SEQ ID NO: 54 - DNA, 33 bp, homo sapiens
atgctgaattaactgcratggcaggagagagtt

SEQ ID NO: 55 - DNA, 33 bp, homo sapiens
cccttcttgtaaggacwccagtcgtattaggac

SEQ ID NO: 56 - DNA, 33 bp, homo sapiens
tggagaggatttgaacycaacgttgctgatgcg

SEQ ID NO: 57 - DNA, 33 bp, homo sapiens
gttcccctctggagaawcaagctgctcttccca

SEQ ID NO: 58 - DNA, 33 bp, homo sapiens
caagaaagagaaaatcraagtccagctggagtc

SEQ ID NO: 59 - DNA, 33 bp, homo sapiens
acaagctgcttacttawatgtagcacacatctg

SEQ ID NO: 60 - DNA, 33 bp, homo sapiens
aatctgggtaggaaagsatcacaagtcaccgga

SEQ ID NO: 61 - DNA, 33 bp, homo sapiens
ctcaaaagcaaatatawcttggttgtcttcagc

SEQ ID NO: 62 - DNA, 33 bp, homo sapiens
tatagccaactgattcrcgcagaatattattgc

SEQ ID NO: 63 - DNA, 33 bp, homo sapiens
aactttagtgagcaaasgatttaaacaaacata

SEQ ID NO: 64 - DNA, 33 bp, homo sapiens
ctcttccgtaccatctmacagtcttctgattaa

SEQ ID NO: 65 - DNA, 33 bp, homo sapiens
gcaaccaataagggagyatgtcatgcaggccaa

SEQ ID NO: 66 - DNA, 33 bp, homo sapiens
gaaaagaaaagataaawccaagagtgtagctat

SEQ ID NO: 67 - DNA, 33 bp, homo sapiens
gagttggccttggtaaygctgggaacctacaaa

SEQ ID NO: 68 - DNA, 33 bp, homo sapiens
aagtcagcaaaaaaggycacctctaatggaaca

SEQ ID NO: 69 - DNA, 33 bp, homo sapiens
tggctgtccattccagsagagtttccatgttat

SEQ ID NO: 70 - DNA, 33 bp, homo sapiens
gacagggaaaaacaacsacagccaagcaaaata

SEQ ID NO: 71 - DNA, 33 bp, homo sapiens
ggtcttcagtgtttccygaagcgaagatgaaga

SEQ ID NO: 72 - DNA, 33 bp, homo sapiens
aagatcagacaatgtasgtagaggctggtgacc

SEQ ID NO: 73 - DNA, 33 bp, homo sapiens
gcgttgctgttaattcratgaggtggtggaatg

SEQ ID NO: 74 - DNA, 33 bp, homo sapiens
agtaaatgagaaacagkcccagcgagggaaagt

SEQ ID NO: 75 - DNA, 33 bp, homo sapiens
tgctgcgtttgattcayagatactcctcagtcg

SEQ ID NO: 76 - DNA, 33 bp, homo sapiens
ctcagcctctctacccsatgtgagcaaagcatc

SEQ ID NO: 77 - DNA, 33 bp, homo sapiens
aatctgaaaattctcamctgaagacaaagtaaa

SEQ ID NO: 78 - DNA, 33 bp, homo sapiens
ttactgactttgatgargcaagccaacttccag

SEQ ID NO: 79 - DNA, 33 bp, homo sapiens
gaaacactggtccagasgagagtgccatagaag

SEQ ID NO: 80 - DNA, 33 bp, homo sapiens
gcagatttggtgagtcyccatgaaatttgggcc

SEQ ID NO: 81 - DNA, 33 bp, homo sapiens
attttaatgtagacaarcttatggaattaggcc

SEQ ID NO: 82 - DNA, 33 bp, homo sapiens
tctacataggccaaccygccgtgtacatgtttc

SEQ ID NO: 83 - DNA, 33 bp, homo sapiens
gagagaactaaggacaratgtaaggttgcttct

SEQ ID NO: 84 - DNA, 33 bp, homo sapiens
gaaagggagaagcgcaygaaagacagaaaagca

SEQ ID NO: 85 - DNA, 33 bp, homo sapiens
tgagtgaagagtcagasaaggcttcctcacatg

SEQ ID NO: 86 - DNA, 33 bp, homo sapiens
tactccgtaagccctarcaatcactaatctgtt

SEQ ID NO: 87 - DNA, 33 bp, homo sapiens
aagccaattccaaaagrctacataccagatgat

SEQ ID NO: 88 - DNA, 33 bp, homo sapiens
atagcgcatcttcaagycctagcgtatacttta

SEQ ID NO: 89 - DNA, 33 bp, homo sapiens
atgtgacctgttaatcraatcctgcaccagccc

SEQ ID NO: 90 - DNA, 33 bp, homo sapiens
ccatgagctaatttaayccttacagcaactttg

SEQ ID NO: 91 - DNA, 33 bp, homo sapiens
aagaaaccaggtgcaaycaagcagagtacagct

SEQ ID NO: 92 - DNA, 33 bp, homo sapiens
ccaaaggaaaaggtcaygcgggacagccctggg

SEQ ID NO: 93 - DNA, 33 bp, homo sapiens
ctagaatcccctaaacsctctcggctgccactt

SEQ ID NO: 94 - DNA, 33 bp, homo sapiens
tggtgagacaagaactsagaagaggcacaaaca

SEQ ID NO: 95 - DNA, 33 bp, homo sapiens
gccattaggcctctgcrattgggaaatggagat

SEQ ID NO: 96 - DNA, 33 bp, homo sapiens
tctaggaagtgggaacrgaatgaacaagttata

SEQ ID NO: 97 - DNA, 33 bp, homo sapiens
gttctagttgccccagycctggatgctcacggg

SEQ ID NO: 98 - DNA, 33 bp, homo sapiens
gaacatcttgtcagcayatggagcctgagaatg

SEQ ID NO: 99 - DNA, 33 bp, homo sapiens
ctagtagctttgactgyacccctaactaacaca

SEQ ID NO: 100 - DNA, 33 bp, homo sapiens
cttggaaagataaaccyaggctattttagagag

SEQ ID NO: 101 - DNA, 33 bp, homo sapiens
caattcaacaggctctraactctgtctgcttac

SEQ ID NO: 102 - DNA, 33 bp, homo sapiens
agatggctgaattcaargtgaccatcaaataca

SEQ ID NO: 103 - DNA, 33 bp, homo sapiens
cttctttttaagtagcmagagcagccctctaga

SEQ ID NO: 104 - DNA, 33 bp, homo sapiens
gttgatctattgcccaracttcccagtgaccac

SEQ ID NO: 105 - DNA, 33 bp, homo sapiens
acagaagttagagtgtyaattatcagttggttc

SEQ ID NO: 106 - DNA, 33 bp, homo sapiens
aagttgtggatggccaygtcctgcggttgaagc

SEQ ID NO: 107 - DNA, 33 bp, homo sapiens
gaggatctgggagaacmaactcgggccagctta

SEQ ID NO: 108 - DNA, 33 bp, homo sapiens
cctcacagaaaactcaycatttaaggtaggtag

SEQ ID NO: 109 - DNA, 33 bp, homo sapiens
acaaatttaatgtctcratgaccagccacctga

SEQ ID NO: 110 - DNA, 33 bp, homo sapiens
tggtcgacgtggaccaygccttgctgcacctct

SEQ ID NO: 111 - DNA, 33 bp, homo sapiens
aattcagatgtaaccaygcattctttagtacat

SEQ ID NO: 112 - DNA, 33 bp, homo sapiens
agcggaaaagagcaaaygtggcttctaacatct

SEQ ID NO: 113 - DNA, 33 bp, homo sapiens
cttctggtccgttctgsaaagagcttcccaaag

SEQ ID NO: 114 - DNA, 33 bp, homo sapiens
ttgttcaaggtctcacygccgctaattggtgga

SEQ ID NO: 115 - DNA, 33 bp, homo sapiens
ccctgtctgctggtgcrcatccctttctgcaca

SEQ ID NO: 116 - DNA, 33 bp, homo sapiens
gccactgaagttaacartcttgtggaaaagaac

SEQ ID NO: 117 - DNA, 33 bp, homo sapiens
gagagtagcattctggrcataaagtgtcatggg

SEQ ID NO: 118 - DNA, 33 bp, homo sapiens
acaacagaaacgttaayaacgaagggagtgagc

SEQ ID NO: 119 - DNA, 33 bp, homo sapiens
agcacacgttttacaaytgtagagatctgaaag

SEQ ID NO: 120 - DNA, 33 bp, homo sapiens
acatagagagaagacaragaatctccctaaagc

SEQ ID NO: 121 - DNA, 33 bp, homo sapiens
aggtgaagtggtgtgamtataagggaagaataa

SEQ ID NO: 122 - DNA, 33 bp, homo sapiens
ttttaattagactccasgaacacaggtaatgga

SEQ ID NO: 123 - DNA, 33 bp, homo sapiens
catcaataaaagagcayggggttgtttctacca

SEQ ID NO: 124 - DNA, 33 bp, homo sapiens
tgtcatgcagtttacakgaaatatttgaatcta

SEQ ID NO: 125 - DNA, 33 bp, homo sapiens
attttaagaaatatgcraactgagtattgaacc

SEQ ID NO: 126 - DNA, 33 bp, homo sapiens
cacataggaagtattcrataaacattagcttat

SEQ ID NO: 127 - DNA, 33 bp, homo sapiens
ggaaggaaccttgcaawtcaaaaggtacaatgc

SEQ ID NO: 128 - DNA, 33 bp, homo sapiens
ccctctgctgggttcaygcttctgtatttggct

SEQ ID NO: 129 - DNA, 33 bp, homo sapiens
cagagaggggacgcaakgtgcccacggccggag

SEQ ID NO: 130 - DNA, 33 bp, homo sapiens
taaggaccactagaaakgtttgttttcaaaact

SEQ ID NO: 131 - DNA, 33 bp, homo sapiens
agctttgttttatctawgtttatcttggctctt

SEQ ID NO: 132 - DNA, 33 bp, homo sapiens
atcccctggcgacatayacagtgtggatctgca

SEQ ID NO: 133 - DNA, 33 bp, homo sapiens
aaacacctgcaggccartcaatactctcacccc

SEQ ID NO: 134 - DNA, 33 bp, homo sapiens
aaaaatcacccagcaarctattctaacagcagg

SEQ ID NO: 135 - DNA, 33 bp, homo sapiens
ttacaatgtattttaartgcaaaatgcccatgg

SEQ ID NO: 136 - DNA, 33 bp, homo sapiens
ctctgtcacctttaaamtcactgttgtagacaa

SEQ ID NO: 137 - DNA, 33 bp, homo sapiens
tcatctgtaaaacgaamtgcctctccctttccc

SEQ ID NO: 138 - DNA, 33 bp, homo sapiens
taaaaagacctgttcargtgtggtcacgtctta

SEQ ID NO: 139 - DNA, 33 bp, homo sapiens
tacaaactcagatacckcttggcaggttaacac

SEQ ID NO: 140 - DNA, 33 bp, homo sapiens
gtgtaaagattagtgamccaaattaagacactc

SEQ ID NO: 141 - DNA, 33 bp, homo sapiens
gtgctctcgggggccgragaaatcccagtctcg

SEQ ID NO: 142 - DNA, 33 bp, homo sapiens
caagtgcaagtgggccyatagcctgtgttctct

SEQ ID NO: 143 - DNA, 33 bp, homo sapiens
attgaaattatcagacrgaataaaagataatct

SEQ ID NO: 144 - DNA, 33 bp, homo sapiens
tgctctgtctctaggcsctgcccaatgtgtccc

SEQ ID NO: 145 - DNA, 33 bp, homo sapiens
tttacttagagcccaarcatctggtgacttttc

SEQ ID NO: 146 - DNA, 33 bp, homo sapiens
tcacagagaaggaaacrgtcacttttcctgcac

SEQ ID NO: 147 - DNA, 33 bp, homo sapiens
ttggtctaaaaaaggcragtaagatattaggtt

SEQ ID NO: 148 - DNA, 33 bp, homo sapiens
tggcacgcagtcagaayttaataaatgataccg

SEQ ID NO: 149 - DNA, 33 bp, homo sapiens
ctggttccttttggcaragaatgatatatagaa

SEQ ID NO: 150 - DNA, 33 bp, homo sapiens
cttgcttagacattacrggttatgctttgagat

SEQ ID NO: 151 - DNA, 33 bp, homo sapiens
tatcataacaaaaagamcatgagttaccatttt

SEQ ID NO: 152 - DNA, 33 bp, homo sapiens
gatcaaaatttgccagyctttttcacttctgcc

SEQ ID NO: 153 - DNA, 33 bp, homo sapiens
gctattcagaattgagwcctgcttccccaggac

SEQ ID NO: 154 - DNA, 33 bp, homo sapiens
cttgagaagaaaaacaraacaaggcgagtcaca

SEQ ID NO: 155 - DNA, 33 bp, homo sapiens
taggtaggttgaaatgraaagaatggaaagaga

SEQ ID NO: 156 - DNA, 33 bp, homo sapiens
acatgttgatagggccraatgagctttagtgcc

SEQ ID NO: 157 - DNA, 33 bp, homo sapiens
aggcagagcttttggaygaataagtggtggatc

SEQ ID NO: 158 - DNA, 33 bp, homo sapiens
tcttcttgtactgcacygtaggcacctggagcc

SEQ ID NO: 159 - DNA, 33 bp, homo sapiens
taggctggattatttargaaaacagacttgtag

SEQ ID NO: 160 - DNA, 33 bp, homo sapiens
gttgaatcgttttacascatgaagagggagtat

SEQ ID NO: 161 - DNA, 33 bp, homo sapiens
tgatagacttgagaaaygagtcacagtaattga

SEQ ID NO: 162 - DNA, 33 bp, homo sapiens
gacagtgggggtaagasaggggttgtattctag

SEQ ID NO: 163 - DNA, 33 bp, homo sapiens
cacagatgcccagaatsagtcactgcagccctg

SEQ ID NO: 164 - DNA, 33 bp, homo sapiens
ctcaatttgtctggtaygtggacccatggctcc

SEQ ID NO: 165 - DNA, 33 bp, homo sapiens
tccaccaaatatgtcargaagagcagtgatatt

SEQ ID NO: 166 - DNA, 33 bp, homo sapiens
tgccctttccagaagaygctgtgtagtttcctg

SEQ ID NO: 167 - DNA, 33 bp, homo sapiens
gataaaacaacactcayatcatgacagtggtat

SEQ ID NO: 168 - DNA, 33 bp, homo sapiens
gtaatttggtttaatgrattctttgtcactgtt

SEQ ID NO: 169 - DNA, 33 bp, homo sapiens
aaggatagatcttacaytcccaaagaatcagag

SEQ ID NO: 170 - DNA, 33 bp, homo sapiens
ccctccataaccctacraatcaactcagtgagg

SEQ ID NO: 171 - DNA, 33 bp, homo sapiens
gcatcccttgtgtctgmaacattcctcacccag

SEQ ID NO: 172 - DNA, 33 bp, homo sapiens
aagaaaccagagccgaratttgaacctagcccc

SEQ ID NO: 173 - DNA, 33 bp, homo sapiens
taatgctctttgtgaaycaggagggcggtcagg

SEQ ID NO: 174 - DNA, 33 bp, homo sapiens
gagggctgaagatagcygaactctagcttggca

SEQ ID NO: 175 - DNA, 33 bp, homo sapiens
gatctccaaaccctcartaaatgtactaaatcc

SEQ ID NO: 176 - DNA, 33 bp, homo sapiens
aaggcctgtaccttgcrgagaaaccctacaagt

SEQ ID NO: 177 - DNA, 33 bp, homo sapiens
cctgggggcctggaaartaggccagctagcaag

SEQ ID NO: 178 - DNA, 33 bp, homo sapiens
agtgctctgttgacaamgagtgtgaggctgctg

SEQ ID NO: 179 - DNA, 33 bp, homo sapiens
caagagataatacttgycaagctcacaaatcaa

SEQ ID NO: 180 - DNA, 33 bp, homo sapiens
ctggaggaggagcctckaggagctgatgtctgg

SEQ ID NO: 181 - DNA, 33 bp, homo sapiens
ggggctctctcatccayggatctagtggacatc

SEQ ID NO: 182 - DNA, 33 bp, homo sapiens
aaacaagaaggatgccratgagtcagaggatgc

SEQ ID NO: 183 - DNA, 33 bp, homo sapiens
tctgccctggggggtcsaataatccaagccagc

SEQ ID NO: 184 - DNA, 33 bp, homo sapiens
gaacttacagatctacyctggactgaaatacaa

SEQ ID NO: 185 - DNA, 33 bp, homo sapiens
agttcatgcttccaaaytatgagctcccatgcc

SEQ ID NO: 186 - DNA, 33 bp, homo sapiens
tggcactggatattccrcacagactgctccaca

SEQ ID NO: 187 - DNA, 33 bp, homo sapiens
acaccttttgcactgaygatttttcttctagaa

SEQ ID NO: 188 - DNA, 33 bp, homo sapiens
acattttaacctggcamtctgtcttctaggaac

SEQ ID NO: 189 - DNA, 33 bp, homo sapiens
ctactgaagcaggaackgtatccactgagcatc

SEQ ID NO: 190 - DNA, 33 bp, homo sapiens
cttaaaccagagacaamggttgggggcatcaca

SEQ ID NO: 191 - DNA, 33 bp, homo sapiens
aaaaagcataatatgawgactgataaaagaccc

SEQ ID NO: 192 - DNA, 33 bp, homo sapiens
tcacattctatatagcwctacctcagtagctct

SEQ ID NO: 193 - DNA, 33 bp, homo sapiens
cacccacatttgggaargggacgtgggagaagt

SEQ ID NO: 194 - DNA, 33 bp, homo sapiens
cctgtcattatcaccaytacagtgaaggcacca

SEQ ID NO: 195 - DNA, 33 bp, homo sapiens
aaaaagaaacgctcaastgtggacagcatgtaa

SEQ ID NO: 196 - DNA, 33 bp, homo sapiens
agaagccttctgtgacygtacaaacataaattg

SEQ ID NO: 197 - DNA, 33 bp, homo sapiens
cctactaacaatgtaayagaggaatgttccatc

SEQ ID NO: 198 - DNA, 33 bp, homo sapiens
tgagatgggaagccacraaagagtttctggcag

SEQ ID NO: 199 - DNA, 33 bp, homo sapiens
tccaagtaatttggtayataataggaccaatgc

SEQ ID NO: 200 - DNA, 33 bp, homo sapiens
ctgtacttttgagagawtacagtaagacagtca

SEQ ID NO: 201 - DNA, 33 bp, homo sapiens
cattccagtcgaggaarcacacaatgagcaaga

SEQ ID NO: 202 - DNA, 33 bp, homo sapiens
acagacactaacaaggsaattacatactgagtg

SEQ ID NO: 203 - DNA, 33 bp, homo sapiens
tctttgcaggaggtgarattttggtacctctgt

SEQ ID NO: 204 - DNA, 33 bp, homo sapiens
gccaactctctattcaygctccctcaaaagtaa

SEQ ID NO: 205 - DNA, 33 bp, homo sapiens
ccaccatgcgcggcccratttctttcttttttc

SEQ ID NO: 206 - DNA, 33 bp, homo sapiens
tttcttctgctgcagasgccaacatcccagtaa

SEQ ID NO: 207 - DNA, 33 bp, homo sapiens
aataagaaagtcttgtraacgccttcatttgat

SEQ ID NO: 208 - DNA, 33 bp, homo sapiens
gttaagacaaaatctaygaaaaagccacatcaa

SEQ ID NO: 209 - DNA, 33 bp, homo sapiens
agcctgggcaagataakgaaaccctgtttctac

SEQ ID NO: 210 - DNA, 33 bp, homo sapiens
gcataaaaggaaggaayccaactctggtgatct

SEQ ID NO: 211 - DNA, 33 bp, homo sapiens
aaattaaacatgatgawcttattagatgagtga

SEQ ID NO: 212 - DNA, 33 bp, homo sapiens
tctacttctctgagaaycccatgcaaaacagta

SEQ ID NO: 213 - DNA, 33 bp, homo sapiens
taggaggagcccctcaycttaaccaccagagag

SEQ ID NO: 214 - DNA, 33 bp, homo sapiens
atggaatcctttttacmgacagaattgtaaggt

SEQ ID NO: 215 - DNA, 33 bp, homo sapiens
gggtaagaaacaagacractcagagaaggccaa

SEQ ID NO: 216 - DNA, 33 bp, homo sapiens
agaagtctgaatcctayctacttggttctctcc

SEQ ID NO: 217 - DNA, 33 bp, homo sapiens
taattagcttgcctggratcatcctctcttttt

SEQ ID NO: 218 - DNA, 33 bp, homo sapiens
tgatctttgacaaaaaygccaagaacccacatt

SEQ ID NO: 219 - DNA, 33 bp, homo sapiens
cacccattacttcagcmagcgttagctctttct

SEQ ID NO: 220 - DNA, 33 bp, homo sapiens
taggtccttgaaatacsctttttgaacaaatac

SEQ ID NO: 221 - DNA, 33 bp, homo sapiens
gaaaaaggaatcatcaygacctggatttctgac

SEQ ID NO: 222 - DNA, 33 bp, homo sapiens
gtgaaagggcaacggargaagaaggaggccaaa

SEQ ID NO: 223 - DNA, 33 bp, homo sapiens
actaatcgccttagccraagatctggctcatcg

SEQ ID NO: 224 - DNA, 33 bp, homo sapiens
cggaatcacttctccartcagtgtttggtgtat

SEQ ID NO: 225 - DNA, 33 bp, homo sapiens
ggaagccacactctaayagcggggatcagatgc

SEQ ID NO: 226 - DNA, 33 bp, homo sapiens
tcaagtcctctacctasaaagcctactattcct

SEQ ID NO: 227 - DNA, 33 bp, homo sapiens
tccctgctcttttgagrccattcgatcctctct

SEQ ID NO: 228 - DNA, 33 bp, homo sapiens
tgctttccatccttacragtaggaacctctcta

SEQ ID NO: 229 - DNA, 33 bp, homo sapiens
tcactataaacacaaaygtaggcttgtatctga

SEQ ID NO: 230 - DNA, 33 bp, homo sapiens
accattgacacaatgamctcatgggtttctatt

SEQ ID NO: 231 - DNA, 33 bp, homo sapiens
agccttattaaagatcratttccacattgcttg

SEQ ID NO: 232 - DNA, 33 bp, homo sapiens
aaaaaaatacctatgcyatcttctgtggagcct

SEQ ID NO: 233 - DNA, 33 bp, homo sapiens
atttacatctttgaagyagtagccggagcagta

SEQ ID NO: 234 - DNA, 33 bp, homo sapiens
taactaagctaggtgargtacccaatctcatta

SEQ ID NO: 235 - DNA, 33 bp, homo sapiens
tgaatcctcacaacaaytctaagtggtcccatt

SEQ ID NO: 236 - DNA, 33 bp, homo sapiens
accttaggtccataccygaacagcttggtggtc

SEQ ID NO: 237 - DNA, 33 bp, homo sapiens
tgaagagagagaggaaratttgaaccaccactg

SEQ ID NO: 238 - DNA, 33 bp, homo sapiens
attgtgtgcagttctayggagaggcccacatgg

SEQ ID NO: 239 - DNA, 33 bp, homo sapiens
gctcacagtccaatgargggggcagaaatgcat

SEQ ID NO: 240 - DNA, 33 bp, homo sapiens
gtagggccaccatatcycagatcctgtattcat

SEQ ID NO: 241 - DNA, 33 bp, homo sapiens
gcttgtaaccagactawaaacaaatgccagata

SEQ ID NO: 242 - DNA, 33 bp, homo sapiens
agtgggtagggccagaycatgaaggctttttgt

SEQ ID NO: 243 - DNA, 33 bp, homo sapiens
tatgtatgaagtgagcraataaagatcgaccca

SEQ ID NO: 244 - DNA, 33 bp, homo sapiens
aaatggcccttgatacraaaaaggaagtcttat

SEQ ID NO: 245 - DNA, 33 bp, homo sapiens
acaacattttaaaaacrgcgaataatggagaat

SEQ ID NO: 246 - DNA, 33 bp, homo sapiens
gactcttaactgtctargctgacaagactcagt

SEQ ID NO: 247 - DNA, 33 bp, homo sapiens
accatcatgactgatcwctggctatgtctaaca

SEQ ID NO: 248 - DNA, 33 bp, homo sapiens
ggctgagaaataggaayggatgtggagaaagga

SEQ ID NO: 249 - DNA, 33 bp, homo sapiens
gaaattgtggcttgagragagtacccaaattca

SEQ ID NO: 250 - DNA, 33 bp, homo sapiens
tattgcaaactcaaaamttccatctaaatatct

SEQ ID NO: 251 - DNA, 33 bp, homo sapiens
gcaacaaggacagtcayagtttgctaaacaaaa

SEQ ID NO: 252 - DNA, 33 bp, homo sapiens
cttaaaaccccaaatcrccagctgttcggctca

SEQ ID NO: 253 - DNA, 33 bp, homo sapiens
cctcacgttaaccacayggtgctcatgaggcaa

SEQ ID NO: 254 - DNA, 33 bp, homo sapiens
gtgcgcctcccgcctayggagaactacatgccc

SEQ ID NO: 255 - DNA, 33 bp, homo sapiens
tcaaggcagactgcacygtgagaaatcatttgt

SEQ ID NO: 256 - DNA, 33 bp, homo sapiens
ccttggctgctgtagayggtcaaggagtcccca

SEQ ID NO: 257 - DNA, 33 bp, homo sapiens
cacagaggcatagtcgyccccagctgggttgtg

SEQ ID NO: 258 - DNA, 33 bp, homo sapiens
cctccaagctgaacctsaatgtagctccagatt

SEQ ID NO: 259 - DNA, 33 bp, homo sapiens
cccggagatgatgaaartaagattggctctttc

SEQ ID NO: 260 - DNA, 33 bp, homo sapiens
ccatataatgttgagcrgaagaagacagacatc

SEQ ID NO: 261 - DNA, 33 bp, homo sapiens
ttgcttcctttccttcrctcatgctcttccctc

SEQ ID NO: 262 - DNA, 33 bp, homo sapiens
acccagtcaagttgacrctaaaattaatcatca

SEQ ID NO: 263 - DNA, 33 bp, homo sapiens
tgcttcctgtgttttcratctctgttgttagat

SEQ ID NO: 264 - DNA, 33 bp, homo sapiens
ggccaccacagacatcrctttcaaggttttccc

SEQ ID NO: 265 - DNA, 33 bp, homo sapiens
ttattttttcctaacaytccacagcatttcaga

SEQ ID NO: 266 - DNA, 33 bp, homo sapiens
gattcactaggtctgcratgggtcccaagaatt

SEQ ID NO: 267 - DNA, 33 bp, homo sapiens
ttcatactgtggtaaaygtgactcgggttcctt

SEQ ID NO: 268 - DNA, 33 bp, homo sapiens
gagcaacctggaaatayaaggctaacagcagac

SEQ ID NO: 269 - DNA, 33 bp, homo sapiens
aagaagtttcatggctwaactcagagattgtac

SEQ ID NO: 270 - DNA, 33 bp, homo sapiens
cctgaatctatagacargagaacatgagtatta

SEQ ID NO: 271 - DNA, 33 bp, homo sapiens
tttcttccctaaccacmgacaaagtcctcacaa

SEQ ID NO: 272 - DNA, 33 bp, homo sapiens
gagctcacctaagtctsagaaagtatgagaaat

SEQ ID NO: 273 - DNA, 33 bp, homo sapiens
gtggagtcatgtttccyagagccttcactgtgc

SEQ ID NO: 274 - DNA, 33 bp, homo sapiens
tgaaacatagaatcaasctctcagaagtctttc

SEQ ID NO: 275 - DNA, 33 bp, homo sapiens
cggtcactctcatatcrctggttgtagtccata

SEQ ID NO: 276 - DNA, 33 bp, homo sapiens
caggttgactctttccracaccctgagtccatc

SEQ ID NO: 277 - DNA, 33 bp, homo sapiens
tgcccctctctaaaccygatcttcattattatt

SEQ ID NO: 278 - DNA, 33 bp, homo sapiens
aagtccaggattagtaygggaaaaaccaactca

SEQ ID NO: 279 - DNA, 33 bp, homo sapiens
aagggaggtaaaaaatragcccagtggtgttag

SEQ ID NO: 280 - DNA, 33 bp, homo sapiens
atattgattcttcccastgcttcctaagaaaac

SEQ ID NO: 281 - DNA, 33 bp, homo sapiens
gacctcttccattatasaaaggacagaggtttg

SEQ ID NO: 282 - DNA, 33 bp, homo sapiens
ttgattcgtgtaatagyaaaaattatctgaatg

SEQ ID NO: 283 - DNA, 33 bp, homo sapiens
tggtggtctctccacayggatgcgcgtgaaagg

SEQ ID NO: 284 - DNA, 33 bp, homo sapiens
aatgtatgtataaaccyaggaataccaagaact

SEQ ID NO: 285 - DNA, 33 bp, homo sapiens
tcactcctgtagtgcayatagttttatacacac

SEQ ID NO: 286 - DNA, 33 bp, homo sapiens
ttaagagaggtccaaasgaatgctaaaggtgct

SEQ ID NO: 287 - DNA, 33 bp, homo sapiens
tctgtatggacaattaycagactgtaacagccg

SEQ ID NO: 288 - DNA, 33 bp, homo sapiens
ctgccacatgagaataygagaagataaccatct

SEQ ID NO: 289 - DNA, 33 bp, homo sapiens
ctatggactgtttgccratttcccatttaagta

SEQ ID NO: 290 - DNA, 33 bp, homo sapiens
cagctctgagacacaaygcttcctgtgagaaga

SEQ ID NO: 291 - DNA, 33 bp, homo sapiens
agccatgatgttttaayaacttgtaattcattc

SEQ ID NO: 292 - DNA, 33 bp, homo sapiens
gtgctcccagatctacragaaaggatggtcaga

SEQ ID NO: 293 - DNA, 33 bp, homo sapiens
cccttttttctgaccckgagcagaggttaacaa

SEQ ID NO: 294 - DNA, 33 bp, homo sapiens
agcaacggttcacagamaatgctcactacaagc

SEQ ID NO: 295 - DNA, 33 bp, homo sapiens
gtgtcagccactgttcyaggtagtagaggatat

SEQ ID NO: 296 - DNA, 33 bp, homo sapiens
aatcatacatatgtcartgaatacccctgattt

SEQ ID NO: 297 - DNA, 33 bp, homo sapiens
tcatcagatctagttasacacctgttcctagac

SEQ ID NO: 298 - DNA, 33 bp, homo sapiens
atcactggccttgtgargaaccctttaatgatc

SEQ ID NO: 299 - DNA, 33 bp, homo sapiens
tttaccttcacaggacmatgggaaactaggctc

SEQ ID NO: 300 - DNA, 33 bp, homo sapiens
aggtactaccagcagtyacagatgggtcagcag

SEQ ID NO: 301 - DNA, 33 bp, homo sapiens
ttcagaagggtgtaacraaatctgcacctgttg

SEQ ID NO: 302 - DNA, 33 bp, homo sapiens
ctgatgatggggtaaartagaagaaaccacaca

SEQ ID NO: 303 - DNA, 33 bp, homo sapiens
ctttttacaaaattgasacaattcatgatttta

SEQ ID NO: 304 - DNA, 33 bp, homo sapiens
gataataaattatacakctgtcagaagcagtgg

SEQ ID NO: 305 - DNA, 33 bp, homo sapiens
gtaatgtgtctgtttasaccttctgcccatttt

SEQ ID NO: 306 - DNA, 33 bp, homo sapiens
cattcacaatttggaasaaaatattcagtgtgg

SEQ ID NO: 307 - DNA, 33 bp, homo sapiens
gagtaagaagttctaartggtagctatgattaa

SEQ ID NO: 308 - DNA, 33 bp, homo sapiens
aaacctatattcaagayggcagcatgatattgt

SEQ ID NO: 309 - DNA, 33 bp, homo sapiens
agggcctccattcccayatgacaatcaaagcac

SEQ ID NO: 310 - DNA, 33 bp, homo sapiens
gtctcaaaatatcccaygaaaacaggcctgtct

SEQ ID NO: 311 - DNA, 33 bp, homo sapiens
tcattctttacagcaarcaatacaataaaggca

SEQ ID NO: 312 - DNA, 33 bp, homo sapiens
tggtcgttagcttacayctgccccccaccaaca

SEQ ID NO: 313 - DNA, 33 bp, homo sapiens
tcgccaccagatgggayaggacaaaccacaaga

SEQ ID NO: 314 - DNA, 33 bp, homo sapiens
atttttcatgtacaagwatggccaactccgtgg

SEQ ID NO: 315 - DNA, 33 bp, homo sapiens
atgttttgtttctccarctactttctctgaagg

SEQ ID NO: 316 - DNA, 33 bp, homo sapiens
tttggaaacgagttagraggctgaaatacataa

SEQ ID NO: 317 - DNA, 33 bp, homo sapiens
gtaattatgccagagamattaggagactttacc

SEQ ID NO: 318 - DNA, 33 bp, homo sapiens
gcatctaactaaactakgtaccaaactagattg

SEQ ID NO: 319 - DNA, 33 bp, homo sapiens
gtgagagtatttttaastgataaatgtggtatt

SEQ ID NO: 320 - DNA, 33 bp, homo sapiens
agacagtctgcccaaasaatggccgggccccag

SEQ ID NO: 321 - DNA, 33 bp, homo sapiens
tctatttcagtggatcracactacagtctttca

SEQ ID NO: 322 - DNA, 33 bp, homo sapiens
aggcctggggcacatcrctgaacaggaaactgc

SEQ ID NO: 323 - DNA, 33 bp, homo sapiens
tgcttataccatggagkctaggtttccttcaag

SEQ ID NO: 324 - DNA, 33 bp, homo sapiens
attatatttccagcatkagaaaagataaagaca

SEQ ID NO: 325 - DNA, 33 bp, homo sapiens
tacactcattagcagarcaatcatactaataac

SEQ ID NO: 326 - DNA, 33 bp, homo sapiens
gtaaatatggaaatacraaaaatgtgcttatct

SEQ ID NO: 327 - DNA, 33 bp, homo sapiens
tgatcaaaaccttatcrattcctactctggtct

SEQ ID NO: 328 - DNA, 33 bp, homo sapiens
catgccagggctcttayggggaaatggggctgt

SEQ ID NO: 329 - DNA, 33 bp, homo sapiens
ttccactgctcaatccrtacagtgagtaaaatt

SEQ ID NO: 330 - DNA, 33 bp, homo sapiens
aatgaccaatgtacttyaagcacacgattattg

SEQ ID NO: 331 - DNA, 33 bp, homo sapiens
ttgtgcatatgcatgakcatactatccatatta

SEQ ID NO: 332 - DNA, 33 bp, homo sapiens
gtgggtttggtggaaarcgagcaaagcaccttg

SEQ ID NO: 333 - DNA, 33 bp, homo sapiens
aactaatgttatgttaycttttagagcttcctg

SEQ ID NO: 334 - DNA, 33 bp, homo sapiens
ggctataaatttgaaaygcactaaaattccatt

SEQ ID NO: 335 - DNA, 33 bp, homo sapiens
ttctgttccgttgataygtgtctatttttctgc

SEQ ID NO: 336 - DNA, 33 bp, homo sapiens
gagatttggaggggacwattatccaaactatat

SEQ ID NO: 337 - DNA, 33 bp, homo sapiens
gtgcaattatataaacwaacattaaagtgctat

SEQ ID NO: 338 - DNA, 33 bp, homo sapiens
gatgacttgaaaggagkacgagatgaatatgtc

SEQ ID NO: 339 - DNA, 33 bp, homo sapiens
atgggccacgtgttaaytacatataactgatat

SEQ ID NO: 340 - DNA, 33 bp, homo sapiens
atacaaatgagttggayggccaaaaatatttgt

SEQ ID NO: 341 - DNA, 33 bp, homo sapiens
actttcaagacagtaasaaaaatgcagggctaa

SEQ ID NO: 342 - DNA, 33 bp, homo sapiens
aaagattattctatggwcaaaatctgcaatttg

SEQ ID NO: 343 - DNA, 33 bp, homo sapiens
ggagtattttggaggaygaaaggttatgttcca

SEQ ID NO: 344 - DNA, 33 bp, homo sapiens
cattttagcacgaaggycatcacagatcataaa

SEQ ID NO: 345 - DNA, 33 bp, homo sapiens
tttattttgctccctcyataatttagtctatat

SEQ ID NO: 346 - DNA, 33 bp, homo sapiens
attctgctcctaggacrccaaactgtggggctt

SEQ ID NO: 347 - DNA, 33 bp, homo sapiens
gtaaatttggagctggmatggtcactttctcca

SEQ ID NO: 348 - DNA, 33 bp, homo sapiens
actccatcattttgacycatctttttttattat

SEQ ID NO: 349 - DNA, 33 bp, homo sapiens
aagaactggaaacaaaraagaagatttcccagg

SEQ ID NO: 350 - DNA, 33 bp, homo sapiens
aaactcgtgcagctcartaataagacaaataat

SEQ ID NO: 351 - DNA, 33 bp, homo sapiens
tgattatgtacggccaygttttatataaagaac

SEQ ID NO: 352 - DNA, 33 bp, homo sapiens
tgcacttttagcttaasgtctaggctaggaaat

SEQ ID NO: 353 - DNA, 33 bp, homo sapiens
tagagattgagttcaaytgacaacagtgaccaa

SEQ ID NO: 354 - DNA, 33 bp, homo sapiens
tgatggttttatgaacragagttgccttgcaca

SEQ ID NO: 355 - DNA, 33 bp, homo sapiens
aactttctgctgccaasagcctaatgtaatagc

SEQ ID NO: 356 - DNA, 33 bp, homo sapiens
ttgaaattcagcactgwcacttgtctactgtga

SEQ ID NO: 357 - DNA, 33 bp, homo sapiens
accaagaggcaaagccyaggccaaaaatggaag

SEQ ID NO: 358 - DNA, 33 bp, homo sapiens
aaaaactggtatagtcmctgtgttactttctgc

SEQ ID NO: 359 - DNA, 33 bp, homo sapiens
ctcagctctctttaccyaatcttctcactccag

SEQ ID NO: 360 - DNA, 33 bp, homo sapiens
acatatagataccttcrcaacctatcccaccta

SEQ ID NO: 361 - DNA, 33 bp, homo sapiens
caaaaagaagaagttayagatctggctatataa

SEQ ID NO: 362 - DNA, 33 bp, homo sapiens
atgaagacagggtccamgtctatttaccttgtt

SEQ ID NO: 363 - DNA, 33 bp, homo sapiens
atcaaatatgtgaaaayaaaagtggtctccttg

SEQ ID NO: 364 - DNA, 33 bp, homo sapiens
aatttggttccttgtgsaggccttcactgtggc

SEQ ID NO: 365 - DNA, 33 bp, homo sapiens
caacaatgcaacaaackcaacaaattcaaaacc

SEQ ID NO: 366 - DNA, 33 bp, homo sapiens
catgactgatctctcarcctacttttgttagcc

SEQ ID NO: 367 - DNA, 33 bp, homo sapiens
aaagtatgacgaaaackcattcattagaaacaa

SEQ ID NO: 368 - DNA, 33 bp, homo sapiens
gacagttttaaggtgamagaagggaggataaaa

SEQ ID NO: 369 - DNA, 33 bp, homo sapiens
agctcatttttcacackggcttcacagaggaaa

SEQ ID NO: 370 - DNA, 33 bp, homo sapiens
gtccttttaatgcagartatcccagatcatata

SEQ ID NO: 371 - DNA, 33 bp, homo sapiens
gcttaagtactttctcraagcattttttcttga

SEQ ID NO: 372 - DNA, 33 bp, homo sapiens
ctagagataacaaaggycaagatgtatgcaact

SEQ ID NO: 373 - DNA, 33 bp, homo sapiens
taaagttttcttatcartaatgactggcaaaca

SEQ ID NO: 374 - DNA, 33 bp, homo sapiens
tgcaggaacagaagaakaaacactacaggtcct

SEQ ID NO: 375 - DNA, 33 bp, homo sapiens
gttcaaagccgcttgcyattgttctcttgctaa

SEQ ID NO: 376 - DNA, 33 bp, homo sapiens
ttctttccaaacatcgyaaattggccccctcca

SEQ ID NO: 377 - DNA, 33 bp, homo sapiens
ttatctacactttcacyatgtcactttactctg

SEQ ID NO: 378 - DNA, 33 bp, homo sapiens
ttcacaggaatctaggmcccaagctataatagc

SEQ ID NO: 379 - DNA, 33 bp, homo sapiens
gatataaataactaccyacatattttgcttttg

SEQ ID NO: 380 - DNA, 33 bp, homo sapiens
agatttttagttccagraaataatgcattatta

SEQ ID NO: 381 - DNA, 33 bp, homo sapiens
agtcaggcatacaaaamgtaggacattacaata

SEQ ID NO: 382 - DNA, 33 bp, homo sapiens
atggaaacctttatcaycagcctaccataatat

SEQ ID NO: 383 - DNA, 33 bp, homo sapiens
cttgactttctggactyagatgattttcctgcc

SEQ ID NO: 384 - DNA, 33 bp, homo sapiens
gatcatggaagtaaaartttgtttccacagtga

SEQ ID NO: 385 - DNA, 33 bp, homo sapiens
gtgctgaaaaaaggacrgatacttagcagccaa

SEQ ID NO: 386 - DNA, 33 bp, homo sapiens
atgattacattgccttraaactatttagcataa

SEQ ID NO: 387 - DNA, 33 bp, homo sapiens
gactgacctcaatggartaggaagtatcagtct

SEQ ID NO: 388 - DNA, 33 bp, homo sapiens
ttagcaaccattctcartccctgtgtcacattg

SEQ ID NO: 389 - DNA, 33 bp, homo sapiens
tgtgcaactcgaataasaaggctaaatttttca

SEQ ID NO: 390 - DNA, 33 bp, homo sapiens
ctttctgtcacagcaargtattctgagctcatc

SEQ ID NO: 391 - DNA, 33 bp, homo sapiens
ggggaaaaggatgatgragtgaggctatagcta

SEQ ID NO: 392 - DNA, 33 bp, homo sapiens
ttgatttttctaggtgycaacttcctgagctca

SEQ ID NO: 393 - DNA, 33 bp, homo sapiens
cctgttatacacagagragacaagatatttgtt

SEQ ID NO: 394 - DNA, 33 bp, homo sapiens
tgtggatgcaacagggragaaagggatagagca

SEQ ID NO: 395 - DNA, 33 bp, homo sapiens
cctctgtctggtctctragaagttcctcctgcc

SEQ ID NO: 396 - DNA, 33 bp, homo sapiens
ttgctctctcctggccsaacagtcagcaggagc

SEQ ID NO: 397 - DNA, 33 bp, homo sapiens
gactatgggacaagcayatggtcgcaggacttt

SEQ ID NO: 398 - DNA, 33 bp, homo sapiens
gcatgaatttgcaatgratgggagaggaagtga

SEQ ID NO: 399 - DNA, 33 bp, homo sapiens
aagagtcaaattgcccraggccataccattctg

SEQ ID NO: 400 - DNA, 33 bp, homo sapiens
agtgttctaagtaaaarcaagtactatcaacta

SEQ ID NO: 401 - DNA, 33 bp, homo sapiens
ggcacaccatcacctgsaataatggaagaaaat

SEQ ID NO: 402 - DNA, 33 bp, homo sapiens
ccagttctgtacctccracaaatcgaaaacctc

SEQ ID NO: 403 - DNA, 33 bp, homo sapiens
gagaaccactggtttargctgagggaggtcttg

SEQ ID NO: 404 - DNA, 33 bp, homo sapiens
ctgcccacaaggatccrgataaatagatcacta

SEQ ID NO: 405 - DNA, 33 bp, homo sapiens
aattgataacattgtcyctagtagtaagaaata

SEQ ID NO: 406 - DNA, 33 bp, homo sapiens
ggcgtgtgataactaayaagcagctactactct

SEQ ID NO: 407 - DNA, 33 bp, homo sapiens
gtgctctggtgagaaamcagaaatgtcttatga

SEQ ID NO: 408 - DNA, 33 bp, homo sapiens
aaaatgctgaagaaacyatttgcagatttccaa

SEQ ID NO: 409 - DNA, 33 bp, homo sapiens
ctgggggcaccctcaaygtggactgtatgctct

SEQ ID NO: 410 - DNA, 33 bp, homo sapiens
gtaattaatatcagtgsatcaaaaacattataa

SEQ ID NO: 411 - DNA, 33 bp, homo sapiens
gattttctgaagtttgwatataaaggccttttg

SEQ ID NO: 412 - DNA, 33 bp, homo sapiens
tcaaaatggtgctacaratttaaggcattattg

SEQ ID NO: 413 - DNA, 33 bp, homo sapiens
tatatattctggatacmaaactctcattacaca

SEQ ID NO: 414 - DNA, 33 bp, homo sapiens
gggaggtagacacaatraaataatgccatggga

SEQ ID NO: 415 - DNA, 33 bp, homo sapiens
cctgaataactaaaaayctgaaggaatcattaa

SEQ ID NO: 416 - DNA, 33 bp, homo sapiens
aagtaatttgttgtatyaaatgccgtgtaaaag

SEQ ID NO: 417 - DNA, 33 bp, homo sapiens
atttctactgaaaaacmggttatacagctacat

SEQ ID NO: 418 - DNA, 33 bp, homo sapiens
ttatccatgaatctaarcaaattgagtttcccc

SEQ ID NO: 419 - DNA, 33 bp, homo sapiens
caaagccataacaaaaytatttgggtccccaac

SEQ ID NO: 420 - DNA, 33 bp, homo sapiens
tgatgataaaccacaakttcactaaaatcgcca

SEQ ID NO: 421 - DNA, 33 bp, homo sapiens
gcagttagtctgttacwcaattattcacaaagg

SEQ ID NO: 422 - DNA, 33 bp, homo sapiens
agctggttctaagccaycttgaatggtattgtg

SEQ ID NO: 423 - DNA, 33 bp, homo sapiens
atgaaaattcctgtaarggtgtaaaaggaccat

SEQ ID NO: 424 - DNA, 33 bp, homo sapiens
tcaatagagaatatccraattgaagtcgagagg

SEQ ID NO: 425 - DNA, 33 bp, homo sapiens
agtgtccctgtaaggarataatgttacctacac

SEQ ID NO: 426 - DNA, 33 bp, homo sapiens
tgtacccacatcacagrcctccattcctgttgc

SEQ ID NO: 427 - DNA, 33 bp, homo sapiens
cctttttctaatcccaycttgtaggaaagttca

SEQ ID NO: 428 - DNA, 33 bp, homo sapiens
tatacaatgattaaackaccccaaaatttgtac

SEQ ID NO: 429 - DNA, 33 bp, homo sapiens
tatatagcaaaagcacsatgatatgggggaaaa

SEQ ID NO: 430 - DNA, 33 bp, homo sapiens
ctatgagctaatatacrccaaatgctgccagat

SEQ ID NO: 431 - DNA, 33 bp, homo sapiens
taggcaggacttataartagacaattatgtaca

SEQ ID NO: 432 - DNA, 33 bp, homo sapiens
ctgtttctgaaaaacawtgagtggttctgtaca

SEQ ID NO: 433 - DNA, 33 bp, homo sapiens
gtgaacatatttcacayggtgcctggtgacaaa

SEQ ID NO: 434 - DNA, 33 bp, homo sapiens
tttcttcttctaaaccrgagtctcctgctgctc

SEQ ID NO: 435 - DNA, 33 bp, homo sapiens
tgaaatatcagatgccyattcagcaactaataa

SEQ ID NO: 436 - DNA, 33 bp, homo sapiens
aatagtaggcaaaatcmacagctgatgaagagg

SEQ ID NO: 437 - DNA, 33 bp, homo sapiens
gaattattcaccaaaaraagctgaagcatttat

SEQ ID NO: 438 - DNA, 33 bp, homo sapiens
gcgcccagatgatacayagttttttttatcttt

SEQ ID NO: 439 - DNA, 33 bp, homo sapiens
aagagacccctgagtayaggaactgtgtctgtt

SEQ ID NO: 440 - DNA, 33 bp, homo sapiens
tctttttgcacttgaayatctgaagcttaatcc

SEQ ID NO: 441 - DNA, 33 bp, homo sapiens
aagaggagaggaaatayctgcttcactttggct

SEQ ID NO: 442 - DNA, 33 bp, homo sapiens
ttctgttagagtaatayctgtttcttgttctcc

SEQ ID NO: 443 - DNA, 33 bp, homo sapiens
aaatgagatgggaataytagaaatgctttggaa

SEQ ID NO: 444 - DNA, 33 bp, homo sapiens
cctttaaatcaattcawtcaatctcctctgcag

SEQ ID NO: 445 - DNA, 33 bp, homo sapiens
aagtagatcgctgggayagaatagagtccaaga

SEQ ID NO: 446 - DNA, 33 bp, homo sapiens
aactagatacaaacacygtgccttacactacca

SEQ ID NO: 447 - DNA, 33 bp, homo sapiens
cctctgtgaaaagcaargttccatcaatgactt

SEQ ID NO: 448 - DNA, 33 bp, homo sapiens
acagtggccccaggaartcaggtttcatgctct

SEQ ID NO: 449 - DNA, 33 bp, homo sapiens
tagaacgaagatgtgaracattcaaaaggggca

SEQ ID NO: 450 - DNA, 33 bp, homo sapiens
cctctgattgctccaamcttactaacaccttgt

SEQ ID NO: 451 - DNA, 33 bp, homo sapiens
aataatgtttaaaagaygtgaagcatttaatcc

SEQ ID NO: 452 - DNA, 33 bp, homo sapiens
ctcagttcccagattcragttccggccttgttc

SEQ ID NO: 453 - DNA, 33 bp, homo sapiens
agggaagtgtggagcargtaaataatattttat

SEQ ID NO: 454 - DNA, 33 bp, homo sapiens
gggtttggtgtctagawtatttcatagtaccca

SEQ ID NO: 455 - DNA, 33 bp, homo sapiens
aagcagagcttgaagasagcaaaatttggcatt

SEQ ID NO: 456 - DNA, 33 bp, homo sapiens
tcattggtatctaatakgccgttagttagtcca

SEQ ID NO: 457 - DNA, 33 bp, homo sapiens
taactaaaatgactgakcttagggctaagccca

SEQ ID NO: 458 - DNA, 33 bp, homo sapiens
ctgagggctgtcagccratggtactctcagcag

SEQ ID NO: 459 - DNA, 33 bp, homo sapiens
gaggacaattatcttayctgtttcacttaaatt

SEQ ID NO: 460 - DNA, 33 bp, homo sapiens
atttattaatcattccraatgtgcattcttcta

SEQ ID NO: 461 - DNA, 33 bp, homo sapiens
aaggttgtatcaatgcwagttatcatatcaagg

SEQ ID NO: 462 - DNA, 33 bp, homo sapiens
ggtgcatggcatctagkaagtttttctggattc

SEQ ID NO: 463 - DNA, 33 bp, homo sapiens
agaaagcaaagtgaccraaatgcagtgggttca

SEQ ID NO: 464 - DNA, 33 bp, homo sapiens
ctgctgacaaatatcargtaaagtaacaaatct

SEQ ID NO: 465 - DNA, 33 bp, homo sapiens
aagtgcaggggaaaaaraagctcaggaatctca

SEQ ID NO: 466 - DNA, 33 bp, homo sapiens
ataaaaaccaatcagcscagagttggtccacaa

SEQ ID NO: 467 - DNA, 33 bp, homo sapiens
aaccctgaccaatgcaraggtcttatccatctg

SEQ ID NO: 468 - DNA, 33 bp, homo sapiens
tccaattgtttttgtarggccttcaatctattg

SEQ ID NO: 469 - DNA, 33 bp, homo sapiens
attcctttagtttcaasaaatgcctacaatgca

SEQ ID NO: 470 - DNA, 33 bp, homo sapiens
tggagcctacttcaaakaactcaactatttctt

SEQ ID NO: 471 - DNA, 33 bp, homo sapiens
tcacacctgttaaatgraaaaataagccctgtc

SEQ ID NO: 472 - DNA, 33 bp, homo sapiens
gcaagtttttcaataayattgtttgcttctgta

SEQ ID NO: 473 - DNA, 33 bp, homo sapiens
tttatatagaacaagartaggggtctaatttca

SEQ ID NO: 474 - DNA, 33 bp, homo sapiens
agccttgctttgatatraaagggcaaaattcac

SEQ ID NO: 475 - DNA, 33 bp, homo sapiens
aaaaatgagtttattaygaaagtctcagggata

SEQ ID NO: 476 - DNA, 33 bp, homo sapiens
tagaaataagatgcaarccatagaggtaattta

SEQ ID NO: 477 - DNA, 33 bp, homo sapiens
atggactaagaagaggraagtagcaactacgtc

SEQ ID NO: 478 - DNA, 33 bp, homo sapiens
gtatgacgccttgataycctgaatagcaccaga

SEQ ID NO: 479 - DNA, 33 bp, homo sapiens
gacataaaatgtataawctgttccaggtaagca

SEQ ID NO: 480 - DNA, 33 bp, homo sapiens
gccctgggtgattccartgaagagccactatca

SEQ ID NO: 481 - DNA, 33 bp, homo sapiens
gaggtgctgttccagasgcagatggccataccg

SEQ ID NO: 482 - DNA, 33 bp, homo sapiens
attttcttgcagtttayaatggtgtcactttaa

SEQ ID NO: 483 - DNA, 33 bp, homo sapiens
gatttgaagagtgtggyatttcaggggacagtg

SEQ ID NO: 484 - DNA, 33 bp, homo sapiens
gttatatctttctcccraacacacgtattctca

SEQ ID NO: 485 - DNA, 33 bp, homo sapiens
ggcccatattgagtgasacctgttaagaaaagt

SEQ ID NO: 486 - DNA, 33 bp, homo sapiens
aactgtaggcaaacccraactcaagctcctcac

SEQ ID NO: 487 - DNA, 33 bp, homo sapiens
gtcccttccatttgccyagtggctttgatacag

SEQ ID NO: 488 - DNA, 33 bp, homo sapiens
tctcttcctgatagagraaatgaaaggttttaa

SEQ ID NO: 489 - DNA, 33 bp, homo sapiens
ctttggacttagacctyaagattgatgctggaa

SEQ ID NO: 490 - DNA, 33 bp, homo sapiens
acttgtggcattatccrcaaccgtcatgtttct

SEQ ID NO: 491 - DNA, 33 bp, homo sapiens
cacaacagtttcaatasggtaggtcctatagca

SEQ ID NO: 492 - DNA, 33 bp, homo sapiens
ctgggtacttgatgaayatggagccacgggatc

SEQ ID NO: 493 - DNA, 33 bp, homo sapiens
aggtactcttctgtacragtctgctagggctat

SEQ ID NO: 494 - DNA, 33 bp, homo sapiens
tcttcaacaaagtgaaytgaacttttcattatc

SEQ ID NO: 495 - DNA, 33 bp, homo sapiens
taatatgtgagtatagwccttagtgattgtagt

SEQ ID NO: 496 - DNA, 33 bp, homo sapiens
tttctttacccattcarctggtcatggacactt

SEQ ID NO: 497 - DNA, 33 bp, homo sapiens
tcattcagggtcctaargtacttcagtctttgt

SEQ ID NO: 498 - DNA, 33 bp, homo sapiens
ttgaacagaactatgcraaacaattgaggtaag

SEQ ID NO: 499 - DNA, 33 bp, homo sapiens
atagctataaccagtgyactcttctcttcctaa

SEQ ID NO: 500 - DNA, 33 bp, homo sapiens
tctggtctctgacaggwacaaatgctaggcagg

SEQ ID NO: 501 - DNA, 33 bp, homo sapiens
aattgggtcagaactcrgaaccattctgctgag

SEQ ID NO: 502 - DNA, 33 bp, homo sapiens
tcttgcctaatgaaaartattctcgtcagctag

SEQ ID NO: 503 - DNA, 33 bp, homo sapiens
ctcacaaaatggtggaygagttctaagggtaaa

SEQ ID NO: 504 - DNA, 33 bp, homo sapiens
tctgccacttctgaacygtatgaaaggtcacga

SEQ ID NO: 505 - DNA, 33 bp, homo sapiens
ggatgggctcctcaccraccattcagatctctg

SEQ ID NO: 506 - DNA, 33 bp, homo sapiens
cacccagtctcttcatyaagattaacttgccca

SEQ ID NO: 507 - DNA, 33 bp, homo sapiens
catgatccatctattcyaagtatcccaaccccc

SEQ ID NO: 508 - DNA, 33 bp, homo sapiens
ggaaaagggccaaggaycaaaagacagacctgg

SEQ ID NO: 509 - DNA, 33 bp, homo sapiens
agaagattttgatggasaggggaggtgaagcaa

SEQ ID NO: 510 - DNA, 33 bp, homo sapiens
aaactggtgttgccatyagcaggttatgcgcta

SEQ ID NO: 511 - DNA, 33 bp, homo sapiens
tctggttgctaataagwcactatgaattaaggt

SEQ ID NO: 512 - DNA, 33 bp, homo sapiens
tactctaacttcctaaygtttcagaagactttt

SEQ ID NO: 513 - DNA, 33 bp, homo sapiens
cataaggaacttttatsagaaagtaatgcaatt

SEQ ID NO: 514 - DNA, 33 bp, homo sapiens
aacagccaggcctagamtaaaagagcagctctg

SEQ ID NO: 515 - DNA, 33 bp, homo sapiens
aaaatattttgcccagmcagtgctatagttcta

SEQ ID NO: 516 - DNA, 33 bp, homo sapiens
agaatggcagaatgacyattaacatcttggaaa

SEQ ID NO: 517 - DNA, 33 bp, homo sapiens
tgatacaaagagcaaaygtaaatatccctttca

SEQ ID NO: 518 - DNA, 33 bp, homo sapiens
acaagtgtttagcttarctccagccagtagaca

SEQ ID NO: 519 - DNA, 33 bp, homo sapiens
cttttacaccattgtamagccaaaataacatta

SEQ ID NO: 520 - DNA, 33 bp, homo sapiens
aattggagaacttcaaygcagtgaaatacagaa

SEQ ID NO: 521 - DNA, 33 bp, homo sapiens
tcttcattattgctcaraaaatagcagtgatgg

SEQ ID NO: 522 - DNA, 33 bp, homo sapiens
gatctaagaactgtgakactacagaaggctatt

SEQ ID NO: 523 - DNA, 33 bp, homo sapiens
acccaaagtccacagaygatacttgatctagcc

SEQ ID NO: 524 - DNA, 33 bp, homo sapiens
cctgttgcagggatcaytctgtgcaatcgtatg

SEQ ID NO: 525 - DNA, 33 bp, homo sapiens
atgctattccaagaacratcattgagtttaata

SEQ ID NO: 526 - DNA, 33 bp, homo sapiens
tttttgtttagaaaccrgaatgttggagattaa

SEQ ID NO: 527 - DNA, 33 bp, homo sapiens
ggacagattttggcaamtaagtagagggaatat

SEQ ID NO: 528 - DNA, 33 bp, homo sapiens
atataggacatataatsaactcaaattgaagga

SEQ ID NO: 529 - DNA, 33 bp, homo sapiens
ttcaaatgctggctgcyaataaacaatattcta

SEQ ID NO: 530 - DNA, 33 bp, homo sapiens
attctattgcctctgayactactctaatccaga

SEQ ID NO: 531 - DNA, 33 bp, homo sapiens
tttaataaaaattctgraaatctaaactgtgac

SEQ ID NO: 532 - DNA, 33 bp, homo sapiens
acttcttgctgagagcmgaacttatcgagcagg

SEQ ID NO: 533 - DNA, 33 bp, homo sapiens
acagggtgatttctacscagaacagaaaatgta

SEQ ID NO: 534 - DNA, 33 bp, homo sapiens
cattttcatgtaccatracataccttcttaacc

SEQ ID NO: 535 - DNA, 33 bp, homo sapiens
agagcttgcgttattarctaatccagaccagtt

SEQ ID NO: 536 - DNA, 33 bp, homo sapiens
actcaccataaataacyagtcttttggtagata

SEQ ID NO: 537 - DNA, 33 bp, homo sapiens
tacgatgagagataacmctgagaggtatggata

SEQ ID NO: 538 - DNA, 33 bp, homo sapiens
atgaaaatttaacctargacaaaatgttgagca

SEQ ID NO: 539 - DNA, 33 bp, homo sapiens
tttgagaattttgtgtkaattgatatgtgggag

SEQ ID NO: 540 - DNA, 33 bp, homo sapiens
atgccatgtgtttcaayttatttttgccttagc

SEQ ID NO: 541 - DNA, 33 bp, homo sapiens
ataaagaaaatgagtamaagatgtgacctaggc

SEQ ID NO: 542 - DNA, 33 bp, homo sapiens
aactgaatctatttgtkaatctaccacctctca

SEQ ID NO: 543 - DNA, 33 bp, homo sapiens
aagctgtattttttctraagtcgcattgttaaa

SEQ ID NO: 544 - DNA, 33 bp, homo sapiens
ctggctttcacaagaartgagtagcagagacag

SEQ ID NO: 545 - DNA, 33 bp, homo sapiens
cctcactataatatggsccaactcttaggaaac

SEQ ID NO: 546 - DNA, 33 bp, homo sapiens
agaaatcagccttaaaygttgaaatccagaaag

SEQ ID NO: 547 - DNA, 33 bp, homo sapiens
aaaatggtttctgctaratgatcttacagtcaa

SEQ ID NO: 548 - DNA, 33 bp, homo sapiens
gtcccattttggcttcyagaggatttgaaatct

SEQ ID NO: 549 - DNA, 33 bp, homo sapiens
ttggtagaattttccaytgaagtcatctctggg

SEQ ID NO: 550 - DNA, 33 bp, homo sapiens
attagttatgcaatgtyaaatgtgtactctttc

SEQ ID NO: 551 - DNA, 33 bp, homo sapiens
ctcactgcaacatctayccaatcggttcaagca

SEQ ID NO: 552 - DNA, 33 bp, homo sapiens
atatttacagcctgtayatctaaaaaagggcta

SEQ ID NO: 553 - DNA, 33 bp, homo sapiens
ccagccacatacttcayacttgatagatttttc

SEQ ID NO: 554 - DNA, 33 bp, homo sapiens
gttaccactggacgacractgctacatttctca

SEQ ID NO: 555 - DNA, 33 bp, homo sapiens
cttccttgttctggtascttatactcagtaatg

SEQ ID NO: 556 - DNA, 33 bp, homo sapiens
cctgcttatatgaaaasgaggagtctgagtata

SEQ ID NO: 557 - DNA, 33 bp, homo sapiens
ccactgcgtccagccawtctgtttattctaaat

SEQ ID NO: 558 - DNA, 33 bp, homo sapiens
attatcgtgaccttccratccactgtcatatgg

SEQ ID NO: 559 - DNA, 33 bp, homo sapiens
gactattatgacctctraatgtagtattctaaa

SEQ ID NO: 560 - DNA, 33 bp, homo sapiens
caggaagcaatacacaraactgagcaaatggga

SEQ ID NO: 561 - DNA, 33 bp, homo sapiens
gagggagtgggcctaayagatccctctagtatg

SEQ ID NO: 562 - DNA, 33 bp, homo sapiens
ctgtgcttcagttttarcagaggctacttacat

SEQ ID NO: 563 - DNA, 33 bp, homo sapiens
tgattcaggctcatccrgattatttaagacagt

SEQ ID NO: 564 - DNA, 33 bp, homo sapiens
caaaggattctcgtgakactcaaataaattatg

SEQ ID NO: 565 - DNA, 33 bp, homo sapiens
atcgcatctttaagtayggtggtcattcaaaac

SEQ ID NO: 566 - DNA, 33 bp, homo sapiens
caagaaaactggaatcrgaggctatactgctaa

SEQ ID NO: 567 - DNA, 33 bp, homo sapiens
taatcagtcaactctakatttaatcagtctgga

SEQ ID NO: 568 - DNA, 33 bp, homo sapiens
gtatttctgcccttcaragatacaaattgaaaa

SEQ ID NO: 569 - DNA, 33 bp, homo sapiens
acttagcatcatgtaartatagtcattaaaatg

SEQ ID NO: 570 - DNA, 33 bp, homo sapiens
aactttcataagccaasatgagataactcaacc

SEQ ID NO: 571 - DNA, 33 bp, homo sapiens
ggttaagtgcctttgakaatttatttatgtacg

SEQ ID NO: 572 - DNA, 33 bp, homo sapiens
taggccacttgaatacygcagaaaaaaattcct

SEQ ID NO: 573 - DNA, 33 bp, homo sapiens
gaagtacagctcaatgrcacatggttgctagag

SEQ ID NO: 574 - DNA, 33 bp, homo sapiens
cataggaatcacataartaagagaaggtgtgtc

SEQ ID NO: 575 - DNA, 33 bp, homo sapiens
gagggaatattgagctraaaagataatggagga

SEQ ID NO: 576 - DNA, 33 bp, homo sapiens
atgttgttccttctgayagaatattgttgtcac

SEQ ID NO: 577 - DNA, 33 bp, homo sapiens
tggtttatgctcaatasgtaaaatatcctatca

SEQ ID NO: 578 - DNA, 33 bp, homo sapiens
tttatcattaagactcyatgcatttcctagtta

SEQ ID NO: 579 - DNA, 33 bp, homo sapiens
aacgtgttagcacaaawattggagcttgtaaat

SEQ ID NO: 580 - DNA, 33 bp, homo sapiens
gcattttttccaaaccraggacctctgggtatg

SEQ ID NO: 581 - DNA, 33 bp, homo sapiens
taatgatagcaataaamcttatcataaattcat

SEQ ID NO: 582 - DNA, 33 bp, homo sapiens
aatttgaactctagagmctataacctttttgct

SEQ ID NO: 583 - DNA, 33 bp, homo sapiens
gaaatccactggttgcrgaagtgttacccttgg

SEQ ID NO: 584 - DNA, 33 bp, homo sapiens
tgaaattttaatgcgamagaagcattgcatatg

SEQ ID NO: 585 - DNA, 33 bp, homo sapiens
tctcaactatatgacgratatgaaacctgcagt

SEQ ID NO: 586 - DNA, 33 bp, homo sapiens
gacctttatttcctcaraatgagtctatttaaa

SEQ ID NO: 587 - DNA, 33 bp, homo sapiens
gctcctggtgcctgtcmccttcctaccagtagg

SEQ ID NO: 588 - DNA, 33 bp, homo sapiens
tgaatctgagcctttargactcaaaattcaaga

SEQ ID NO: 589 - DNA, 33 bp, homo sapiens
cttaaacactattcaamaactgatcctaacagt

SEQ ID NO: 590 - DNA, 33 bp, homo sapiens
cacccctgggcagagargtgcaactttaagaga

SEQ ID NO: 591 - DNA, 33 bp, homo sapiens
tgaaaactgaaatggcratacctggaaagaacc

SEQ ID NO: 592 - DNA, 33 bp, homo sapiens
tatgaaagtggcgctcraagcgttaacttagag

SEQ ID NO: 593 - DNA, 33 bp, homo sapiens
tggggatcagagcagcragaggtgggaggcaaa

SEQ ID NO: 594 - DNA, 33 bp, homo sapiens
ggtgacataaagacttsaacggagtgagagagt

SEQ ID NO: 595 - DNA, 33 bp, homo sapiens
atgatctcactaggtgyagatttataagaccct

SEQ ID NO: 596 - DNA, 33 bp, homo sapiens
cagacacatggcgagcrcgatgtaaaagctggt

SEQ ID NO: 597 - DNA, 33 bp, homo sapiens
gttaagatccaggtgcrgagattgaagtgtggg

SEQ ID NO: 598 - DNA, 33 bp, homo sapiens
agacagatagatgagcrgagaaagggattgatg

SEQ ID NO: 599 - DNA, 33 bp, homo sapiens
atctactgtcttgctcrcttttgctttctgttt

SEQ ID NO: 600 - DNA, 33 bp, homo sapiens
gggaccaggaaaagacscgagagacggaactcg

SEQ ID NO: 601 - DNA, 33 bp, homo sapiens
tgcaaaattgcatacgrccggagtaaagtcaac

SEQ ID NO: 602 - DNA, 33 bp, homo sapiens
ctcactcattacctgakgctcttttcccccacc

SEQ ID NO: 603 - DNA, 33 bp, homo sapiens
caacattttggcttaasaaattgcaaatatgaa

SEQ ID NO: 604 - DNA, 33 bp, homo sapiens
gcaaggagaccattgaygcaggatatgaaattt

SEQ ID NO: 605 - DNA, 33 bp, homo sapiens
ctttggagtgagatcartacctaacaacattga

SEQ ID NO: 606 - DNA, 33 bp, homo sapiens
gagattgttgattttaygatcttgtaataaaaa

SEQ ID NO: 607 - DNA, 33 bp, homo sapiens
gtgttctctccaaacayggttttctagcaggcc

SEQ ID NO: 608 - DNA, 33 bp, homo sapiens
tagagctggtggttacrgaataaactagaaggc

SEQ ID NO: 609 - DNA, 33 bp, homo sapiens
attttaaaaggaatacragtaatgccctgaaaa

SEQ ID NO: 610 - DNA, 33 bp, homo sapiens
aacttcacatctcccaktagtagggattttgct

SEQ ID NO: 611 - DNA, 33 bp, homo sapiens
gagaagattctttgtawagtcggagcccagaga

SEQ ID NO: 612 - DNA, 33 bp, homo sapiens
tttcagcagtgccatarccagggagctaataat

SEQ ID NO: 613 - DNA, 33 bp, homo sapiens
tttgctttcacaggccrctattggttttacctc

SEQ ID NO: 614 - DNA, 33 bp, homo sapiens
cttcatcatcatggtayaaaaattctgtggtga

SEQ ID NO: 615 - DNA, 33 bp, homo sapiens
tgggagtttggctgaayctagagcggcctctgg

SEQ ID NO: 616 - DNA, 33 bp, homo sapiens
ataaacttcctacatgrcatctgggcccgtgtc

SEQ ID NO: 617 - DNA, 33 bp, homo sapiens
gcacatgcatacgagaraacttattatttacat

SEQ ID NO: 618 - DNA, 33 bp, homo sapiens
attctcacatgtttaamcttgacattaaacttc

SEQ ID NO: 619 - DNA, 33 bp, homo sapiens
gctcttacaaaatccarattcattagcacagtt

SEQ ID NO: 620 - DNA, 33 bp, homo sapiens
agattcaaagacttaarctttcagaataaggca

SEQ ID NO: 621 - DNA, 33 bp, homo sapiens
tgctatgtgaagaaaartctgcaaggggcaagg

SEQ ID NO: 622 - DNA, 33 bp, homo sapiens
cacttacctgaataaasaatgacaaggagatat

SEQ ID NO: 623 - DNA, 33 bp, homo sapiens
gcggccttcccagtaargtgctttctgtgcctg

SEQ ID NO: 624 - DNA, 33 bp, homo sapiens
agaatgagtaagattaygccatgaagttcttag

SEQ ID NO: 625 - DNA, 33 bp, homo sapiens
ggaagaaagagaaatckgagttggactgaggaa

SEQ ID NO: 626 - DNA, 33 bp, homo sapiens
gacatctttgtggtgayggaatggttctgcctt

SEQ ID NO: 627 - DNA, 33 bp, homo sapiens
gattctggatgtaacaycgagacgaacagttgt

SEQ ID NO: 628 - DNA, 33 bp, homo sapiens
cttatccttagcccaargcaaccagtaacctat

SEQ ID NO: 629 - DNA, 33 bp, homo sapiens
acttcctgtttttcacmaggtttctgtgagcat

SEQ ID NO: 630 - DNA, 33 bp, homo sapiens
gccagtaaggaaatccrctcataatgcccattg

SEQ ID NO: 631 - DNA, 33 bp, homo sapiens
aaattagatattaaacrcttcaaccacataaga

SEQ ID NO: 632 - DNA, 33 bp, homo sapiens
agaggttatgcaagctsaaatgtggaaagtttt

SEQ ID NO: 633 - DNA, 33 bp, homo sapiens
ccagggaccctgtatayggccaattcaagaaga

SEQ ID NO: 634 - DNA, 33 bp, homo sapiens
tacacaggatagaacaygataatatgcgtgagc

SEQ ID NO: 635 - DNA, 33 bp, homo sapiens
tcctagctatgcatccraatcatctggatggag

SEQ ID NO: 636 - DNA, 33 bp, homo sapiens
ggcagtttggagatgaytcaaacaactgagttg

SEQ ID NO: 637 - DNA, 33 bp, homo sapiens
tttaaaaatattgcaaygatgtctcacaaatag

SEQ ID NO: 638 - DNA, 33 bp, homo sapiens
cagggaaccagtctaayggctgcaaagccttcc

SEQ ID NO: 639 - DNA, 33 bp, homo sapiens
caagcaaggaagccctsagccatttagcactca

SEQ ID NO: 640 - DNA, 33 bp, homo sapiens
agctttggtccgtggcractgggagaagggcct

SEQ ID NO: 641 - DNA, 33 bp, homo sapiens
caactctctctctagcragaaatatctgaatta

SEQ ID NO: 642 - DNA, 33 bp, homo sapiens
ttctctcccttcccgarcaactctaactcgtct

SEQ ID NO: 643 - DNA, 33 bp, homo sapiens
tctctctctcatagtawacatagcacaaggtac

SEQ ID NO: 644 - DNA, 33 bp, homo sapiens
cactcagaactactgawatacacaacatagatc

SEQ ID NO: 645 - DNA, 33 bp, homo sapiens
cacacttattgaaaagsctatttctattacatt

SEQ ID NO: 646 - DNA, 33 bp, homo sapiens
cataaaaaagctcttarctataatctaaaaaca

SEQ ID NO: 647 - DNA, 33 bp, homo sapiens
aaggcactcaactctarcctgtgaaagccctgg

SEQ ID NO: 648 - DNA, 33 bp, homo sapiens
tagggcagggtctttaygtcatcaaacgacaca

SEQ ID NO: 649 - DNA, 33 bp, homo sapiens
atctctctgctaacatyacctatctgttattgc

SEQ ID NO: 650 - DNA, 33 bp, homo sapiens
ccacaaaatagacatamaaatacaagctatgtc

SEQ ID NO: 651 - DNA, 33 bp, homo sapiens
gttatattctaaatccygcaaagtggagacagg

SEQ ID NO: 652 - DNA, 33 bp, homo sapiens
ggtggagaagagactgkaattgagactggctag

SEQ ID NO: 653 - DNA, 33 bp, homo sapiens
tggcaaggtgcacagaratgagggtgaaagaac

SEQ ID NO: 654 - DNA, 33 bp, homo sapiens
cttagtaccataggaamaagctctgtgatcaat

SEQ ID NO: 655 - DNA, 33 bp, homo sapiens
ttattaccttgtataakaagaagtcctaggtta

SEQ ID NO: 656 - DNA, 33 bp, homo sapiens
tccacaggcggccacawtgtcctgttttgctcc

SEQ ID NO: 657 - DNA, 33 bp, homo sapiens
ccaaaagctctgccccyagttctcctgtatggt

SEQ ID NO: 658 - DNA, 33 bp, homo sapiens
ccctcttcatatcacamaaatcagttcattctc

SEQ ID NO: 659 - DNA, 33 bp, homo sapiens
accaggaataaagaaaygtatctagagcaggtc

SEQ ID NO: 660 - DNA, 33 bp, homo sapiens
tcagggataggagatgsaaagaaggttttgtgg

SEQ ID NO: 661 - DNA, 33 bp, homo sapiens
accattaatgtgcaaamaaaattaaggtataaa

SEQ ID NO: 662 - DNA, 33 bp, homo sapiens
cgctggcgcaggttccrgatttcaccaagatgc

SEQ ID NO: 663 - DNA, 33 bp, homo sapiens
aaaggaatcaaggaaarcttcatgaaggaggag

SEQ ID NO: 664 - DNA, 33 bp, homo sapiens
ggccataagaaagaatsaagtcgtgccatttgt

SEQ ID NO: 665 - DNA, 33 bp, homo sapiens
gtgtctcccacaatcargaaatatacctcctcc

SEQ ID NO: 666 - DNA, 33 bp, homo sapiens
atactttatgaggtacygataaatgcaagtctg

SEQ ID NO: 667 - DNA, 33 bp, homo sapiens
caaatgtgtgtgaatartaaaaagattctgagc

SEQ ID NO: 668 - DNA, 33 bp, homo sapiens
actgctatcctctgagragaactggacttcaat

SEQ ID NO: 669 - DNA, 33 bp, homo sapiens
atacttcctggctttgmaacttacaataacgat

SEQ ID NO: 670 - DNA, 33 bp, homo sapiens
cagatggtgatagttgraattcattttgaatgc

SEQ ID NO: 671 - DNA, 33 bp, homo sapiens
atggggttattcccagrctccatgtggcgctgg

SEQ ID NO: 672 - DNA, 33 bp, homo sapiens
cttaaacaatgactacyattttgataaaaggac

SEQ ID NO: 673 - DNA, 33 bp, homo sapiens
gataagcttctgggaaracacttaacccaaagt

SEQ ID NO: 674 - DNA, 33 bp, homo sapiens
gatgaactggattaaaytatatgcaacaacatg

SEQ ID NO: 675 - DNA, 33 bp, homo sapiens
cgggcatccctgctaayacctgctcgaaggagt

SEQ ID NO: 676 - DNA, 33 bp, homo sapiens
caggcattattcgaccmatttggtaaataggaa

SEQ ID NO: 677 - DNA, 33 bp, homo sapiens
gaaagctttgaagtccmgaaaatgcaaatacag

SEQ ID NO: 678 - DNA, 33 bp, homo sapiens
ctttgaaaattccagayatagcaatggatttta

SEQ ID NO: 679 - DNA, 33 bp, homo sapiens
ttccttcttactcatcycgtgccatctaccctt

SEQ ID NO: 680 - DNA, 33 bp, homo sapiens
gaccccctgatgcttcyacgtgctcctcatctg

SEQ ID NO: 681 - DNA, 33 bp, homo sapiens
gtgagtaaacaataacrataagtgacaactctc

SEQ ID NO: 682 - DNA, 33 bp, homo sapiens
ctggatccagactgccyatgcctatatacaact

SEQ ID NO: 683 - DNA, 33 bp, homo sapiens
taaaagtcaaggatggycagtaagtccctacag

SEQ ID NO: 684 - DNA, 33 bp, homo sapiens
ggatacaaagcagtgastaaatactagctcttc

SEQ ID NO: 685 - DNA, 33 bp, homo sapiens
agttgttctagcagagwctatttgcctgggctt

SEQ ID NO: 686 - DNA, 33 bp, homo sapiens
catgtggctcttttcayataggcttggatgggc

SEQ ID NO: 687 - DNA, 33 bp, homo sapiens
aaacaaacattgtacaraaaagagtaaatgcag

SEQ ID NO: 688 - DNA, 33 bp, homo sapiens
gggtgagtgttggagasatgggtatgtagaggt

SEQ ID NO: 689 - DNA, 33 bp, homo sapiens
ctcttctgtcatataayaggtttcctcatttat

SEQ ID NO: 690 - DNA, 33 bp, homo sapiens
ctgtctggaatgcacaragcctcatttcttacg

SEQ ID NO: 691 - DNA, 33 bp, homo sapiens
tattccaaacttagaaytgaagaggccagcaac

SEQ ID NO: 692 - DNA, 33 bp, homo sapiens
gggatgaagagacaaamgtcagagacaggggat

SEQ ID NO: 693 - DNA, 33 bp, homo sapiens
tttgtgttttaagctamgtattattacaaaagg

SEQ ID NO: 694 - DNA, 33 bp, homo sapiens
aatccacagtgaactamggcatgtttgttaaac

SEQ ID NO: 695 - DNA, 33 bp, homo sapiens
tcttcgtgatcgacaayggcgcggatgactggc

SEQ ID NO: 696 - DNA, 33 bp, homo sapiens
ctcattttgatcctcasgcacatgcttgttgtc

SEQ ID NO: 697 - DNA, 33 bp, homo sapiens
tggctactcaggaattkaaaatgacagcggtag

SEQ ID NO: 698 - DNA, 33 bp, homo sapiens
agctccatatcttggcrctgtgacttcctggga

SEQ ID NO: 699 - DNA, 33 bp, homo sapiens
aagcaactaggaagggyactttaggcagcatga

SEQ ID NO: 700 - DNA, 33 bp, homo sapiens
tgtgacatgagcaaaarttttctactaccagaa

SEQ ID NO: 701 - DNA, 33 bp, homo sapiens
tctggaaacactgtccyctgtcaggctggtgaa

SEQ ID NO: 702 - DNA, 33 bp, homo sapiens
cccctgagagaattcaygttgccagcaataaac

SEQ ID NO: 703 - DNA, 33 bp, homo sapiens
actccacccaacagtasaagaatgcatggaata

SEQ ID NO: 704 - DNA, 33 bp, homo sapiens
aaagactgagatctccyagataaaccggaacat

SEQ ID NO: 705 - DNA, 33 bp, homo sapiens
aactgtgaaaaaccgawgatctctctaagaaga

SEQ ID NO: 706 - DNA, 33 bp, homo sapiens
agcatctctgtagatcmaagaactcctgctgcc

SEQ ID NO: 707 - DNA, 33 bp, homo sapiens
tgccacttaagtgttaygtctagggaaatacta

SEQ ID NO: 708 - DNA, 33 bp, homo sapiens
ttcttttcctcatagamcatcatacctgagagg

SEQ ID NO: 709 - DNA, 33 bp, homo sapiens
gtgttaagcactttagyatgccttgtactgaac

SEQ ID NO: 710 - DNA, 33 bp, homo sapiens
aacagacacacggaccrggagagagaaactaga

SEQ ID NO: 711 - DNA, 33 bp, homo sapiens
ctagccaacagaagaayttactttctcaaccac

SEQ ID NO: 712 - DNA, 33 bp, homo sapiens
aggggggacagcagcayatagtgaaccagctgt

SEQ ID NO: 713 - DNA, 33 bp, homo sapiens
ccgaggtaaagagcaartatatagatcatgaac

SEQ ID NO: 714 - DNA, 33 bp, homo sapiens
gtctataggagataagscacagtaaaacgttga

SEQ ID NO: 715 - DNA, 33 bp, homo sapiens
ccttttatgaaatacarcttaattttctcaaag

SEQ ID NO: 716 - DNA, 33 bp, homo sapiens
tgttgctctttctgcarggctagtctggaaaga

SEQ ID NO: 717 - DNA, 33 bp, homo sapiens
agagtcaaagctagcaygtcctctttagccatc

SEQ ID NO: 718 - DNA, 33 bp, homo sapiens
agaaaggatcgcaaagwaactggaatatagagg

SEQ ID NO: 719 - DNA, 33 bp, homo sapiens
aaccactagcttgtaawgactagaagaaataca

SEQ ID NO: 720 - DNA, 33 bp, homo sapiens
agaactctgataaacartatgtttggcattctg

SEQ ID NO: 721 - DNA, 33 bp, homo sapiens
atcaaatatgttttctsaccaaagggatttagg

SEQ ID NO: 722 - DNA, 33 bp, homo sapiens
tgttctccaggaacacrgcccctccaaagcact

SEQ ID NO: 723 - DNA, 33 bp, homo sapiens
gctaaaggacttaaagratactggacaatccat

SEQ ID NO: 724 - DNA, 33 bp, homo sapiens
acgtaaatgaagaacartaacagactgtgctga

SEQ ID NO: 725 - DNA, 33 bp, homo sapiens
aacattaaaggccacgsaaattctgtaattttt

SEQ ID NO: 726 - DNA, 33 bp, homo sapiens
agaccagatatgcacaytgagcaacagagatta

SEQ ID NO: 727 - DNA, 33 bp, homo sapiens
attcagagaattggaasacttcttgggctgaag

SEQ ID NO: 728 - DNA, 33 bp, homo sapiens
ctgcagctccctgaacrcagtgaagatactccc

SEQ ID NO: 729 - DNA, 33 bp, homo sapiens
attgttcgatttgctasaatgaaatctgctagt

SEQ ID NO: 730 - DNA, 33 bp, homo sapiens
ccaaatcttgctgagamaattgggctaaggggg

SEQ ID NO: 731 - DNA, 33 bp, homo sapiens
gcagaagtgatacgacrcccctggacagcatgc

SEQ ID NO: 732 - DNA, 33 bp, homo sapiens
aaatcctgcatcatggmatcttagaactggaag

SEQ ID NO: 733 - DNA, 33 bp, homo sapiens
cccaaagatgtctacayactaatccccagaaca

SEQ ID NO: 734 - DNA, 33 bp, homo sapiens
ttagacatctactttayggtcggtataaaggca

SEQ ID NO: 735 - DNA, 33 bp, homo sapiens
ctgtcctcaaaacagaygctctcccagcaggcc

SEQ ID NO: 736 - DNA, 33 bp, homo sapiens
aagtgcagctttaatawgaatagtttcatcagt

SEQ ID NO: 737 - DNA, 33 bp, homo sapiens
ctgttgatagagatgtraattagtacactatta

SEQ ID NO: 738 - DNA, 33 bp, homo sapiens
tctctgggctgaatcarctattccttccttgat

SEQ ID NO: 739 - DNA, 33 bp, homo sapiens
tcaagagatgaacatawgaatgtaatatcactt

SEQ ID NO: 740 - DNA, 33 bp, homo sapiens
aaaaaggtgaagaaaaygctaaggaatatatag

SEQ ID NO: 741 - DNA, 33 bp, homo sapiens
aaaattttgaaaacagsaatgcatgaacatcat

SEQ ID NO: 742 - DNA, 33 bp, homo sapiens
gctaatctcaccaccaraagtcactgatgttgg

SEQ ID NO: 743 - DNA, 33 bp, homo sapiens
tcttcttgctgttgacrctaaaggtgagaaagg

SEQ ID NO: 744 - DNA, 33 bp, homo sapiens
tcagacattattgccaygtatagtagtttaaaa

SEQ ID NO: 745 - DNA, 33 bp, homo sapiens
cactggcttccctgaawccctggagacagcttg

SEQ ID NO: 746 - DNA, 33 bp, homo sapiens
tttactcttccattccrctatgtaacatgactt

SEQ ID NO: 747 - DNA, 33 bp, homo sapiens
aggattcataggttcayaggagctctggagtta

SEQ ID NO: 748 - DNA, 33 bp, homo sapiens
gaagtttatcatgatcrcttggattgctctgga

SEQ ID NO: 749 - DNA, 33 bp, homo sapiens
actgttaccattgttcycgtactccttttagag

SEQ ID NO: 750 - DNA, 33 bp, homo sapiens
gcttctgttgtccaaartatttcttattcatac

SEQ ID NO: 751 - DNA, 33 bp, homo sapiens
gagctcagcgttctgarataattacgattagtt

SEQ ID NO: 752 - DNA, 33 bp, homo sapiens
cattctgtagcataatragcattacttttgaag

SEQ ID NO: 753 - DNA, 33 bp, homo sapiens
ttttgtaaaattctgaygtttagaaccatgttt

SEQ ID NO: 754 - DNA, 33 bp, homo sapiens
ccaggcagatacataaraggcctcacatgctcc

SEQ ID NO: 755 - DNA, 33 bp, homo sapiens
cctatttggagtgtacygctttggctctgaatt

SEQ ID NO: 756 - DNA, 33 bp, homo sapiens
gatgtatcattatcccycaaagttcatagttta

SEQ ID NO: 757 - DNA, 33 bp, homo sapiens
ctggatagggaccaaasgatttccttcacatat

SEQ ID NO: 758 - DNA, 33 bp, homo sapiens
aaaaatcaccttgctcratatttaagaccaaga

SEQ ID NO: 759 - DNA, 33 bp, homo sapiens
aataacaccattttccyatcctctttccacctc

SEQ ID NO: 760 - DNA, 33 bp, homo sapiens
cctttggagaccagaasagcattgacagccccc

SEQ ID NO: 761 - DNA, 33 bp, homo sapiens
gtgtgattttcaaccargtacgtgttatgcaaa

SEQ ID NO: 762 - DNA, 33 bp, homo sapiens
ttacttaagtcctacayaaacagaacagctttc

SEQ ID NO: 763 - DNA, 33 bp, homo sapiens
gccagtaacatcaagayaggatcttccaccagc

SEQ ID NO: 764 - DNA, 33 bp, homo sapiens
tcataaaaccgactaaragttggtctgctttgt

SEQ ID NO: 765 - DNA, 33 bp, homo sapiens
tatgtagattagacaamtccatgtgttactaac

SEQ ID NO: 766 - DNA, 33 bp, homo sapiens
tcttggaatttagctaycatgcttagagaaagc

SEQ ID NO: 767 - DNA, 33 bp, homo sapiens
aaagcactactctctaycttcccaactcggtct

SEQ ID NO: 768 - DNA, 33 bp, homo sapiens
tcccccaaaatacctgscagatgtagtgtaaac

SEQ ID NO: 769 - DNA, 33 bp, homo sapiens
ctcataatattgaatcrccaatttaactgcagc

SEQ ID NO: 770 - DNA, 33 bp, homo sapiens
cttcccactgtagcaawgtgagcttttttttct

SEQ ID NO: 771 - DNA, 33 bp, homo sapiens
tgtctatcagacaaackatgcagaagttaggaa

SEQ ID NO: 772 - DNA, 33 bp, homo sapiens
tgaacctggactagaasacagaataaactatga

SEQ ID NO: 773 - DNA, 33 bp, homo sapiens
cctcaaacttctatgcrcaatctgggaggaggg

SEQ ID NO: 774 - DNA, 33 bp, homo sapiens
gcgtacccacaatagcraggaactcttttgttt

SEQ ID NO: 775 - DNA, 33 bp, homo sapiens
attcagtaaatttccaragttgcagaccgttta

SEQ ID NO: 776 - DNA, 33 bp, homo sapiens
agagatctgggctggcrgaaccgaaggaggagt

SEQ ID NO: 777 - DNA, 33 bp, homo sapiens
gaagaagcgcttgccartgacaaggtaaaggca

SEQ ID NO: 778 - DNA, 33 bp, homo sapiens
ctctgaccttatcttcyaccttgctcattacat

SEQ ID NO: 779 - DNA, 33 bp, homo sapiens
tacttctacttgtcacycccctacacctataca

SEQ ID NO: 780 - DNA, 33 bp, homo sapiens
aatttaaaaataaagayagcacatgaagaaaca

SEQ ID NO: 781 - DNA, 33 bp, homo sapiens
gacgtggacatcatgaragacatcgcctctggg

SEQ ID NO: 782 - DNA, 33 bp, homo sapiens
catataatattagcagracaatgccttttaaag

SEQ ID NO: 783 - DNA, 33 bp, homo sapiens
tccttattggtgtcaarttctgccttttaataa

SEQ ID NO: 784 - DNA, 33 bp, homo sapiens
ctagccattgtgtctasgtgctcggaatgaaac

SEQ ID NO: 785 - DNA, 33 bp, homo sapiens
tctctctaacacttagwaagccatgaagggctg

SEQ ID NO: 786 - DNA, 33 bp, homo sapiens
ttcgtttagacatggcraacgttagaaaagatt

SEQ ID NO: 787 - DNA, 33 bp, homo sapiens
atcatacatgaaacaaygtgcccacaatggaat

SEQ ID NO: 788 - DNA, 33 bp, homo sapiens
agcctatcattgtcaayatcattctacttagcc

SEQ ID NO: 789 - DNA, 33 bp, homo sapiens
gatgagagtaacaggamaacaactgaaacatgg

SEQ ID NO: 790 - DNA, 33 bp, homo sapiens
tgataggctattctgcyattagaactcacaaca

SEQ ID NO: 791 - DNA, 33 bp, homo sapiens
gatggtaaattgacccragggaagcaaaaaaaa

SEQ ID NO: 792 - DNA, 33 bp, homo sapiens
ataccttctcagttcaytctctgggttcttggt

SEQ ID NO: 793 - DNA, 33 bp, homo sapiens
aggagagaagagggaakagtgaaaaggactttg

SEQ ID NO: 794 - DNA, 33 bp, homo sapiens
taatgtatctcttccaygtattgatgtatgtct

SEQ ID NO: 795 - DNA, 33 bp, homo sapiens
caggcacatattgaaastctacaagtgccagga

SEQ ID NO: 796 - DNA, 33 bp, homo sapiens
tgttttgtcaaagcaargagtctgaaggttaac

SEQ ID NO: 797 - DNA, 33 bp, homo sapiens
aagcaattttcctagaygagttctgtatagtct

SEQ ID NO: 798 - DNA, 33 bp, homo sapiens
gacttgctttaagccaygctgctgcctactcag

SEQ ID NO: 799 - DNA, 33 bp, homo sapiens
cagcctcacttaggcayattgcagttaaagaat

SEQ ID NO: 800 - DNA, 33 bp, homo sapiens
gacgagtgagtgcttayaggaaaaagttttctt

SEQ ID NO: 801 - DNA, 33 bp, homo sapiens
ccattagaaaattgccracactaaggctcatcc

SEQ ID NO: 802 - DNA, 33 bp, homo sapiens
aatcctgatcctgctawaagttttataaactgt

SEQ ID NO: 803 - DNA, 33 bp, homo sapiens
caagaaccacatagacrgtcaggttttctgtgt

SEQ ID NO: 804 - DNA, 33 bp, homo sapiens
gaggtctatgatcttamaacttttggaagtgag

SEQ ID NO: 805 - DNA, 33 bp, homo sapiens
tgcagcaataactacartgagtcctagctcttg

SEQ ID NO: 806 - DNA, 33 bp, homo sapiens
ctgaaaagtaaaggaargcctctgaaaattcag

SEQ ID NO: 807 - DNA, 33 bp, homo sapiens
agcatcaatgcagacastacaaatcaacctggc

SEQ ID NO: 808 - DNA, 33 bp, homo sapiens
gagttgggatggaacartattcagtcagacgat

SEQ ID NO: 809 - DNA, 33 bp, homo sapiens
ttgatccatggagcaarcattgagaagtaacaa

SEQ ID NO: 810 - DNA, 33 bp, homo sapiens
ccatgagaaaggactcrgagcctccagaatttc

SEQ ID NO: 811 - DNA, 33 bp, homo sapiens
ggcaaaattacagaaayggagaacaggttagta

SEQ ID NO: 812 - DNA, 33 bp, homo sapiens
gggaaagaagcgtcaakaacttgaacagaaatc

SEQ ID NO: 813 - DNA, 33 bp, homo sapiens
acctttctctctacccrattcctccagaatgca

SEQ ID NO: 814 - DNA, 33 bp, homo sapiens
ctcctgaatccaagtawcacgtctggcctgttc

SEQ ID NO: 815 - DNA, 33 bp, homo sapiens
atgagtctctatattcrcctatcagtctctcca

SEQ ID NO: 816 - DNA, 33 bp, homo sapiens
agtgggactttccctamctgctactgttggctg

SEQ ID NO: 817 - DNA, 33 bp, homo sapiens
gcaacttcatcaattawattgccatatcaacac

SEQ ID NO: 818 - DNA, 33 bp, homo sapiens
agtagcaagaagaaacyggtaagaagccttggg

SEQ ID NO: 819 - DNA, 33 bp, homo sapiens
gactgaactccagctarggccacttgtctttgt

SEQ ID NO: 820 - DNA, 33 bp, homo sapiens
actagttgaattcaccrgaactcacagatttgc

SEQ ID NO: 821 - DNA, 33 bp, homo sapiens
aactgcttttgaattakctagctgtttctgtaa

SEQ ID NO: 822 - DNA, 33 bp, homo sapiens
tttctaatctctcttcragaacaaattttttta

SEQ ID NO: 823 - DNA, 33 bp, homo sapiens
tctgggtaaactactarcctagctttttccaaa

SEQ ID NO: 824 - DNA, 33 bp, homo sapiens
gacactgaggttcaaartcagaaagtagtgtac

SEQ ID NO: 825 - DNA, 33 bp, homo sapiens
tcactggcagattttargcctgggattgacatg

SEQ ID NO: 826 - DNA, 33 bp, homo sapiens
agtgaaaggggcttcartattctctgggatgta

SEQ ID NO: 827 - DNA, 33 bp, homo sapiens
aatcacttctacagcayatggaaattacggaag

SEQ ID NO: 828 - DNA, 33 bp, homo sapiens
ttgttcccagtctaccyctagatcctgcacatg

SEQ ID NO: 829 - DNA, 33 bp, homo sapiens
ttccttggcttttccamgtttgcatagctccat

SEQ ID NO: 830 - DNA, 33 bp, homo sapiens
acctaccagtatattarctcacatctttgctca

SEQ ID NO: 831 - DNA, 33 bp, homo sapiens
gaacctctgcatgacartatttgctgaggctag

SEQ ID NO: 832 - DNA, 33 bp, homo sapiens
gtaggtaggttcaaacygcttactaaatattta

SEQ ID NO: 833 - DNA, 33 bp, homo sapiens
tgtaaaatagagaggasaggggctcaactaagt

SEQ ID NO: 834 - DNA, 33 bp, homo sapiens
attctggcttttgcacrgtagctgagctgagca

SEQ ID NO: 835 - DNA, 33 bp, homo sapiens
agataattttggtcacmacaactagggatgaag

SEQ ID NO: 836 - DNA, 33 bp, homo sapiens
aggatcttgcaaaaaayaaaccaggataagaca

SEQ ID NO: 837 - DNA, 33 bp, homo sapiens
aattttgcagaggttcyaattttgcccacaacc

SEQ ID NO: 838 - DNA, 33 bp, homo sapiens
agttgataatgacaatsaacaaccatgttatgg

SEQ ID NO: 839 - DNA, 33 bp, homo sapiens
aggccatctttgtgcaygttgaaactttccagg

SEQ ID NO: 840 - DNA, 33 bp, homo sapiens
cacccagtttttactcyccatcagactacagct

SEQ ID NO: 841 - DNA, 33 bp, homo sapiens
gtatgtagagatggcargttgtatatgtaaaaa

SEQ ID NO: 842 - DNA, 33 bp, homo sapiens
cctggggcaatagtaayatgaatccacatagag

SEQ ID NO: 843 - DNA, 33 bp, homo sapiens
catgcagaggaatagaraggctaataaaacaag

SEQ ID NO: 844 - DNA, 33 bp, homo sapiens
acttcagcgcaaaggaratcagagtgaatatga

SEQ ID NO: 845 - DNA, 33 bp, homo sapiens
taaaggatgggaactgmaactagaagaccgtca

SEQ ID NO: 846 - DNA, 33 bp, homo sapiens
aatgcattcacggtaamaacacagtagcatcac

SEQ ID NO: 847 - DNA, 33 bp, homo sapiens
caaagtaccccacttayctccaactttacaaag

SEQ ID NO: 848 - DNA, 33 bp, homo sapiens
agcttctcctgacttaygttctttagacaggat

SEQ ID NO: 849 - DNA, 33 bp, homo sapiens
cttcttatgacatctckaactgggctatctcat

SEQ ID NO: 850 - DNA, 33 bp, homo sapiens
tagttcaatagctttcycttctgtgaaacatct

SEQ ID NO: 851 - DNA, 33 bp, homo sapiens
ctcaaaatagcgcagcwctgactctacttaaga

SEQ ID NO: 852 - DNA, 33 bp, homo sapiens
tcttgtcttaatccccratacatcagtgtagtt

SEQ ID NO: 853 - DNA, 33 bp, homo sapiens
acatcaccaagctaccrggaaagcataatataa

SEQ ID NO: 854 - DNA, 33 bp, homo sapiens
ctcacgggagtcatcayaaggatcagagtagat

SEQ ID NO: 855 - DNA, 33 bp, homo sapiens
cttatttataaaacacrctttgctaagagctaa

SEQ ID NO: 856 - DNA, 33 bp, homo sapiens
tccattagaaagatggraagaagaggatggatt

SEQ ID NO: 857 - DNA, 33 bp, homo sapiens
tggcaaatagaaaacargaagggaataccaagc

SEQ ID NO: 858 - DNA, 33 bp, homo sapiens
caaagtgctgggattayatggacatttttattg

SEQ ID NO: 859 - DNA, 33 bp, homo sapiens
ttggagaggtaaatgayacaggaatggaaacat

SEQ ID NO: 860 - DNA, 33 bp, homo sapiens
attttcatttccctaaygatgaatgatattgag

SEQ ID NO: 861 - DNA, 33 bp, homo sapiens
tcagcaggtgggacacrgaaactgaggacacag

SEQ ID NO: 862 - DNA, 33 bp, homo sapiens
cacagcaggtgaaaaaktctatccacctatgtc

SEQ ID NO: 863 - DNA, 33 bp, homo sapiens
ttttctattcctgaagkctaacatgtgtccctc

SEQ ID NO: 864 - DNA, 33 bp, homo sapiens
ggatgagaaattctggraaaagtaacagaagtg

SEQ ID NO: 865 - DNA, 33 bp, homo sapiens
cctccgttttcctttcyagaggcaagcgctatt

SEQ ID NO: 866 - DNA, 33 bp, homo sapiens
tagttcaatgaaagaarcacgtaatttgaagca

SEQ ID NO: 867 - DNA, 33 bp, homo sapiens
ctccacgggtgatttaygactgctggcatgtaa

SEQ ID NO: 868 - DNA, 33 bp, homo sapiens
tgtttggggaacactamgaaataaggctgcttg

SEQ ID NO: 869 - DNA, 33 bp, homo sapiens
actacaagtgtctaacwggttcttcacttacaa

SEQ ID NO: 870 - DNA, 33 bp, homo sapiens
ttactatggttctaaamgggaaagtaaatcatt

SEQ ID NO: 871 - DNA, 33 bp, homo sapiens
atgtaaagtttataaaragctactggcttaaaa

SEQ ID NO: 872 - DNA, 33 bp, homo sapiens
tacatttcattctctgyaaccaatgtgtagaac

SEQ ID NO: 873 - DNA, 33 bp, homo sapiens
atgtcactgaaaacaaragtcagtttgaattag

SEQ ID NO: 874 - DNA, 33 bp, homo sapiens
tgtgacactattcaccrcatcctccctattgaa

SEQ ID NO: 875 - DNA, 33 bp, homo sapiens
ggctacaattcctaaaycccagcaagagtcaaa

SEQ ID NO: 876 - DNA, 33 bp, homo sapiens
atttagctggtaaaatmattctagctccttaat

SEQ ID NO: 877 - DNA, 33 bp, homo sapiens
tgtaatgttctagatcwgatcatcttaggcttt

SEQ ID NO: 878 - DNA, 33 bp, homo sapiens
aaagagagatgaaatcrccaggaactttacatt

SEQ ID NO: 879 - DNA, 33 bp, homo sapiens
ttttaaaagagcaagaraaatatgaagtaaaat

SEQ ID NO: 880 - DNA, 33 bp, homo sapiens
ttttgaaagtggaagarctttatgcacagaaaa

SEQ ID NO: 881 - DNA, 33 bp, homo sapiens
gagaactagttaacaaygttttagaggctactg

SEQ ID NO: 882 - DNA, 33 bp, homo sapiens
aaacctttacagctcargtcctctgtcagtgtc

SEQ ID NO: 883 - DNA, 33 bp, homo sapiens
taattgattttctgcakggttcatttgattatc

SEQ ID NO: 884 - DNA, 33 bp, homo sapiens
ttctcaggtcgtaaaawtctcaaacaactgtga

SEQ ID NO: 885 - DNA, 33 bp, homo sapiens
ttcatctgtgcaaataractttacgattgtttt

SEQ ID NO: 886 - DNA, 33 bp, homo sapiens
tatataactgttaatckgagtgtatgttccatc

SEQ ID NO: 887 - DNA, 33 bp, homo sapiens
gtgtcattgtgcgaaawtgtcctaaacctacac

SEQ ID NO: 888 - DNA, 33 bp, homo sapiens
tcaggccttctaattgkaataattcttgagctg

SEQ ID NO: 889 - DNA, 33 bp, homo sapiens
tgtggcattagattgamcaattttttttttgag

SEQ ID NO: 890 - DNA, 33 bp, homo sapiens
tgtgatgtgataaaaaygacacctcatctctgt

SEQ ID NO: 891 - DNA, 33 bp, homo sapiens
tatccctgctattgagmaaaagaaaattcaaaa

SEQ ID NO: 892 - DNA, 33 bp, homo sapiens
aaccattgcaattatgyagaaatgcacctgtct

SEQ ID NO: 893 - DNA, 33 bp, homo sapiens
aatcattaacaatacasaagtgagttttaattt

SEQ ID NO: 894 - DNA, 33 bp, homo sapiens
atgcctgtcctgcccaytaatctccatattcct

SEQ ID NO: 895 - DNA, 33 bp, homo sapiens
caaaattagagtttagyatccacaaagaacaaa

SEQ ID NO: 896 - DNA, 33 bp, homo sapiens
tcttgtacttgttctarccttaggatcagttgc

SEQ ID NO: 897 - DNA, 33 bp, homo sapiens
ggtcttgtgcctttctkaaactctgttacacat

SEQ ID NO: 898 - DNA, 33 bp, homo sapiens
ttttccataatggctaygtcaatttacatttct

SEQ ID NO: 899 - DNA, 33 bp, homo sapiens
agagtaactgtttccaygcaaatgccctttcca

SEQ ID NO: 900 - DNA, 33 bp, homo sapiens
taatcgcttttaaaggycccaactcaatactgt

SEQ ID NO: 901 - DNA, 33 bp, homo sapiens
gtagttatttggagacyggagataaatgagaat

SEQ ID NO: 902 - DNA, 33 bp, homo sapiens
tttgcctatttctaatsactgaaaagaacttaa

SEQ ID NO: 903 - DNA, 33 bp, homo sapiens
aatgccactgctgatcraacagtaagtgaaact

SEQ ID NO: 904 - DNA, 33 bp, homo sapiens
ctttcctggaaattctraagttagacttcatag

SEQ ID NO: 905 - DNA, 33 bp, homo sapiens
agttaactaatgaagaygcagcattctggagaa

SEQ ID NO: 906 - DNA, 33 bp, homo sapiens
aatatattactatgaaycaggtcaggtagagaa

SEQ ID NO: 907 - DNA, 33 bp, homo sapiens
ggtttgagcctgtattkaagtgaattgaagaat

SEQ ID NO: 908 - DNA, 33 bp, homo sapiens
agagagaaaatagtcartactagaggatttaga

SEQ ID NO: 909 - DNA, 33 bp, homo sapiens
tgtccttgttggaagaygagtatcagagaaaaa

SEQ ID NO: 910 - DNA, 33 bp, homo sapiens
gtgaagatgtagaacaratgaaacattcaccat

SEQ ID NO: 911 - DNA, 33 bp, homo sapiens
acaaatgaaaggaagaygcaatctcatatccac

SEQ ID NO: 912 - DNA, 33 bp, homo sapiens
agtggaagacgttgcartctgtaatgcactgaa

SEQ ID NO: 913 - DNA, 33 bp, homo sapiens
caagggcaaatcacaartggtcagaatatcaga

SEQ ID NO: 914 - DNA, 33 bp, homo sapiens
tagaattgtgcttttaraggcaatatttcaatg

SEQ ID NO: 915 - DNA, 33 bp, homo sapiens
aatactggttatatgcrcaaagaaaaataaatt

SEQ ID NO: 916 - DNA, 33 bp, homo sapiens
tcatattggtaaatcarataatcaattcatttt

SEQ ID NO: 917 - DNA, 33 bp, homo sapiens
tcatcacaatgggaagwcagtgtttcctacata

SEQ ID NO: 918 - DNA, 33 bp, homo sapiens
gatgcttacctcaacgraagtatagagacttta

SEQ ID NO: 919 - DNA, 33 bp, homo sapiens
taacataagtcacccawctaacaaactgaaaaa

SEQ ID NO: 920 - DNA, 33 bp, homo sapiens
ttggtatgataataagratgagggaaccaaagt

SEQ ID NO: 921 - DNA, 33 bp, homo sapiens
ctattgaaagtgactawgtctattggtaggtct

SEQ ID NO: 922 - DNA, 33 bp, homo sapiens
taaatatattatctgcycaaataagccaatgtt

SEQ ID NO: 923 - DNA, 33 bp, homo sapiens
aggatttaatagatcamatagtaagtgctcaat

SEQ ID NO: 924 - DNA, 33 bp, homo sapiens
ataaaacgtatgggtayaagtggaaactggaaa

SEQ ID NO: 925 - DNA, 33 bp, homo sapiens
tactcattgtaaattcrgaacggttaagaaacg

SEQ ID NO: 926 - DNA, 33 bp, homo sapiens
tcaaaccactctcaackagatttttacagtgaa

SEQ ID NO: 927 - DNA, 33 bp, homo sapiens
ttttagataataggcaytgaaataatttgggta

SEQ ID NO: 928 - DNA, 33 bp, homo sapiens
acacatggaaaagcagraacccagatgtatttg

SEQ ID NO: 929 - DNA, 33 bp, homo sapiens
tacttcaagtataaaayttctgaggtttccttt

SEQ ID NO: 930 - DNA, 33 bp, homo sapiens
tcactggaaaccctcawgataaagcctgaactt

SEQ ID NO: 931 - DNA, 33 bp, homo sapiens
aataggcaagggaaaayggtatgctggaatttc

SEQ ID NO: 932 - DNA, 33 bp, homo sapiens
tgagtgcgatatgctayggcagacagttatctc

SEQ ID NO: 933 - DNA, 33 bp, homo sapiens
tagaggaggtgtcactsaaagtctcaggcaatg

SEQ ID NO: 934 - DNA, 33 bp, homo sapiens
tggtgtcttgttggaargtgtccactgctagag

SEQ ID NO: 935 - DNA, 33 bp, homo sapiens
ccacaggttgtgcagargaggtcaattagatat

SEQ ID NO: 936 - DNA, 33 bp, homo sapiens
gaaagccggatgcatayactgagcaactgcaca

SEQ ID NO: 937 - DNA, 33 bp, homo sapiens
acacatactaccttccyacggcagccaagtggt

SEQ ID NO: 938 - DNA, 33 bp, homo sapiens
ggcaactttgagtcacragatggagttgaatgg

SEQ ID NO: 939 - DNA, 33 bp, homo sapiens
cctctggatctcctgawgcgaagaagaaagaaa

SEQ ID NO: 940 - DNA, 33 bp, homo sapiens
cagagctagagagttayaaaatctatttccaaa

SEQ ID NO: 941 - DNA, 33 bp, homo sapiens
aaatacaacaaaatacrataattgagacatgtc

SEQ ID NO: 942 - DNA, 33 bp, homo sapiens
gacaggaggccttgtamaacccatcctcatgat

SEQ ID NO: 943 - DNA, 33 bp, homo sapiens
tattctggatagctggrcatagctcccctctga

SEQ ID NO: 944 - DNA, 33 bp, homo sapiens
tgcctgcaaagtgcacygatgcttcttttccta

SEQ ID NO: 945 - DNA, 33 bp, homo sapiens
aaatatggtacctagayacaaacataaaggcag

SEQ ID NO: 946 - DNA, 33 bp, homo sapiens
taagtactttcttctcyccatacttcagattgg

SEQ ID NO: 947 - DNA, 33 bp, homo sapiens
cgaaattcagagagaarcaagtgagtaggagtg

SEQ ID NO: 948 - DNA, 33 bp, homo sapiens
caggaacatcttagtgyaatagtgaggtgtgga

SEQ ID NO: 949 - DNA, 33 bp, homo sapiens
atctgattcgctccacwcccccttggtaactgc

SEQ ID NO: 950 - DNA, 33 bp, homo sapiens
gtaaagtgggttcttcratatctcagttgtgtg

SEQ ID NO: 951 - DNA, 33 bp, homo sapiens
cagcagaatcttaagasaatgacaaaaatggta

SEQ ID NO: 952 - DNA, 33 bp, homo sapiens
cttctgtgagctgggasaactttctgacccaca

SEQ ID NO: 953 - DNA, 33 bp, homo sapiens
ctttcccatacacacaragattccctctttctt

SEQ ID NO: 954 - DNA, 33 bp, homo sapiens
gaaaccagcttctataratctaatgcccaagag

SEQ ID NO: 955 - DNA, 33 bp, homo sapiens
cctccttccctcatcaygcttcactccccatcg

SEQ ID NO: 956 - DNA, 33 bp, homo sapiens
agaacgatactagaggmagaaatctccctgcat

SEQ ID NO: 957 - DNA, 33 bp, homo sapiens
ccacactgcccagggayatagggttgttggctc

SEQ ID NO: 958 - DNA, 33 bp, homo sapiens
tgtgtaaagagtctcartcccatttcactgata

SEQ ID NO: 959 - DNA, 33 bp, homo sapiens
gtttcatgagtccctgkagtataaggatacagg

SEQ ID NO: 960 - DNA, 33 bp, homo sapiens
tagctttctttcttcckaaatgtccatttggct

SEQ ID NO: 961 - DNA, 33 bp, homo sapiens
acttaatagcaaaagamgagcacaattgccaga

SEQ ID NO: 962 - DNA, 33 bp, homo sapiens
ctctcctttctttccaycctttgactctgaacc

SEQ ID NO: 963 - DNA, 33 bp, homo sapiens
tagggaattttctgcaytagaatagatgttata

SEQ ID NO: 964 - DNA, 33 bp, homo sapiens
cacacatgcaaatacakgggctgtgttcacaca

SEQ ID NO: 965 - DNA, 33 bp, homo sapiens
aagttttgtcaggtcawgtatttctgatctaaa

SEQ ID NO: 966 - DNA, 33 bp, homo sapiens
tgagtcagaattctccrctgcaagtcccactaa

SEQ ID NO: 967 - DNA, 33 bp, homo sapiens
gttatctttaagagccrcgagtcttgatgagat

SEQ ID NO: 968 - DNA, 33 bp, homo sapiens
ccagagttcacagaagwcaggataaaggttagg

SEQ ID NO: 969 - DNA, 33 bp, homo sapiens
tgtaggacactggaaayggatccagagttcaca

SEQ ID NO: 970 - DNA, 33 bp, homo sapiens
aagaatagtaaacatayctggaaagtaatgaga

SEQ ID NO: 971 - DNA, 33 bp, homo sapiens
tggatgtccacaagctyaatttatttatgtcaa

SEQ ID NO: 972 - DNA, 33 bp, homo sapiens
tctgccaacttaaagcragattgtctggtctag

SEQ ID NO: 973 - DNA, 33 bp, homo sapiens
gaggcattcattttcaytagaaagcaccaagtt

SEQ ID NO: 974 - DNA, 33 bp, homo sapiens
aaagaccctatggacargtaactgacaggtagc

SEQ ID NO: 975 - DNA, 33 bp, homo sapiens
tctcttggcagatatasgtgggctggtgtgcat

SEQ ID NO: 976 - DNA, 33 bp, homo sapiens
tgttttagaaagacaawctggtgctgttcttac

SEQ ID NO: 977 - DNA, 33 bp, homo sapiens
acacacagctgtgcacrcagttaccagcacaca

SEQ ID NO: 978 - DNA, 33 bp, homo sapiens
tggatcctaaggtgaarttatttccttcaaaat

SEQ ID NO: 979 - DNA, 33 bp, homo sapiens
aataatgcttagcacayagaaggagctccataa

SEQ ID NO: 980 - DNA, 33 bp, homo sapiens
agcttccattctaaaayccctaataccaactca

SEQ ID NO: 981 - DNA, 33 bp, homo sapiens
gaactgcccgttttccygcgggagctggctgcc

SEQ ID NO: 982 - DNA, 33 bp, homo sapiens
gggctcggctctggaarctactgtgactttctc

SEQ ID NO: 983 - DNA, 33 bp, homo sapiens
agcccaagttccccaastctctcatggaatcct

SEQ ID NO: 984 - DNA, 33 bp, homo sapiens
taacacttaccttaaarcacatacattgtacag

SEQ ID NO: 985 - DNA, 33 bp, homo sapiens
caatgtcacttcaagaragttatcagacctcat

SEQ ID NO: 986 - DNA, 33 bp, homo sapiens
gtttcacagccctcacygtcaggaaagtcccct

SEQ ID NO: 987 - DNA, 33 bp, homo sapiens
tgcctggatgaaatgaygtggtagcaccttttt

SEQ ID NO: 988 - DNA, 33 bp, homo sapiens
aagtttatcttcttacyagctgagggcatgaaa

SEQ ID NO: 989 - DNA, 33 bp, homo sapiens
atggaggttataggaawtgggcctagagttggg

SEQ ID NO: 990 - DNA, 33 bp, homo sapiens
aatttgttggaaggaaygaaggaagatcccaat

SEQ ID NO: 991 - DNA, 33 bp, homo sapiens
tgtattactaatagagmctacgcatttactatc

SEQ ID NO: 992 - DNA, 33 bp, homo sapiens
caggttcaatgctatcrctattaaactaccaat

SEQ ID NO: 993 - DNA, 33 bp, homo sapiens
agtatccaacgttccawacgaaatttagaatag

SEQ ID NO: 994 - DNA, 33 bp, homo sapiens
aacctagccctcttgamaattatccctctccag

SEQ ID NO: 995 - DNA, 33 bp, homo sapiens
ccatttgaaaaagggamgaatgagaaacatagc

SEQ ID NO: 996 - DNA, 33 bp, homo sapiens
ccctgaaggccaggacwgtacctcgggcctcca

SEQ ID NO: 997 - DNA, 33 bp, homo sapiens
caatcaagtgcgcaccraaatacatgtttctaa

SEQ ID NO: 998 - DNA, 33 bp, homo sapiens
tccggaagatcagcgaygtgaaacgtgaagagg

SEQ ID NO: 999 - DNA, 33 bp, homo sapiens
cccagcattgtaccagragaaatcccagagacg

SEQ ID NO: 1000 - DNA, 33 bp, homo sapiens
aaatatccgactatgaycctattttatagaacc

SEQ ID NO: 1001 - DNA, 33 bp, homo sapiens
cgggtcagtaatttcayatggagcaagcagcag

SEQ ID NO: 1002 - DNA, 33 bp, homo sapiens
gaagaacaagcacctayggtcacccagagttgc

SEQ ID NO: 1003 - DNA, 33 bp, homo sapiens
tataagtttacaaggayaattaccaacgcatta

SEQ ID NO: 1004 - DNA, 33 bp, homo sapiens
aataacacacttaaagycttccactcaaggtct

SEQ ID NO: 1005 - DNA, 33 bp, homo sapiens
cagctgccttcaactcrctttacagcttgtcac

SEQ ID NO: 1006 - DNA, 33 bp, homo sapiens
accccaaatacactggycaggggtgtccaagct

SEQ ID NO: 1007 - DNA, 33 bp, homo sapiens
cttcaaagatcgaaggmccatcagcccacaaag

SEQ ID NO: 1008 - DNA, 33 bp, homo sapiens
aagggcctgttcacackggcttcaaagttactc

SEQ ID NO: 1009 - DNA, 33 bp, homo sapiens
atggtgttaaaggagcmaaactattccatataa

SEQ ID NO: 1010 - DNA, 33 bp, homo sapiens
acagaaggcttccaaastggaaatgaggaagtc

SEQ ID NO: 1011 - DNA, 33 bp, homo sapiens
cttctattaatagtgaygtgaagactaggaaag

SEQ ID NO: 1012 - DNA, 33 bp, homo sapiens
ttgggctatacctaaaygtttgaaatgtctatt

SEQ ID NO: 1013 - DNA, 33 bp, homo sapiens
agcctcactcaaccaaycattttgcagaaaagt

SEQ ID NO: 1014 - DNA, 33 bp, homo sapiens
cttaccaaaagatgcayggctagaaaagaatgg

SEQ ID NO: 1015 - DNA, 33 bp, homo sapiens
aggcgcctgtggcatamgactgagttctggttg

SEQ ID NO: 1016 - DNA, 33 bp, homo sapiens
tgcaaggattcagccartcaagtcaattggagt

SEQ ID NO: 1017 - DNA, 33 bp, homo sapiens
aagacacaaagtctgcratctcggaaaggtgaa

SEQ ID NO: 1018 - DNA, 33 bp, homo sapiens
agaagggtactttgtgraattttgcatggcctg

SEQ ID NO: 1019 - DNA, 33 bp, homo sapiens
taggtgatccatgcgartactgtctatttgcag

SEQ ID NO: 1020 - DNA, 33 bp, homo sapiens
aatttaaaccaatttgracttgataattttaat

SEQ ID NO: 1021 - DNA, 33 bp, homo sapiens
ttcctaagacaaaaccrcctgccaactgaaagc

SEQ ID NO: 1022 - DNA, 33 bp, homo sapiens
gctactcaaaaaacagwatatgcaagcgattat

SEQ ID NO: 1023 - DNA, 33 bp, homo sapiens
taactttgaaataggaygtaggactcgactctg

SEQ ID NO: 1024 - DNA, 33 bp, homo sapiens
taattcggccattgtaygttttatctttaacaa

SEQ ID NO: 1025 - DNA, 33 bp, homo sapiens
gcaacacaactgacacracattttttggtagaa

SEQ ID NO: 1026 - DNA, 33 bp, homo sapiens
ccattagggaggccacratcatattcctcattc

SEQ ID NO: 1027 - DNA, 33 bp, homo sapiens
gaatagtttcagaatcraaatcaactcaccctc

SEQ ID NO: 1028 - DNA, 33 bp, homo sapiens
tcgtctctagctcagartacaaaacaaagccct

SEQ ID NO: 1029 - DNA, 33 bp, homo sapiens
ttatggtgatggttaartaagttcagacataaa

SEQ ID NO: 1030 - DNA, 33 bp, homo sapiens
cctttctcggttgatcyattaattattctgctt

SEQ ID NO: 1031 - DNA, 33 bp, homo sapiens
tagggctctgcttaccrctccagacaaattcat

SEQ ID NO: 1032 - DNA, 33 bp, homo sapiens
gtggaagaaaagaaggsataggagttgaaatac

SEQ ID NO: 1033 - DNA, 33 bp, homo sapiens
aaaggttgcgaaagacrcaaagaaatattggat

SEQ ID NO: 1034 - DNA, 33 bp, homo sapiens
tttcgtgattggcttamcctgcttgtttcactt

SEQ ID NO: 1035 - DNA, 33 bp, homo sapiens
cagaagggctacactamaccaatcataattcta

SEQ ID NO: 1036 - DNA, 33 bp, homo sapiens
aacattagagcaaacaycagctaaaaatctaca

SEQ ID NO: 1037 - DNA, 33 bp, homo sapiens
agttctttacacaataygaagcacatggcaagc

SEQ ID NO: 1038 - DNA, 33 bp, homo sapiens
tgtaaatgattcagctmactgagttcatgtcta

SEQ ID NO: 1039 - DNA, 33 bp, homo sapiens
aaagaagacacttgacycaaaatcatttagaaa

SEQ ID NO: 1040 - DNA, 33 bp, homo sapiens
atatcgtggagaagtamatgtcccatctgcact

SEQ ID NO: 1041 - DNA, 33 bp, homo sapiens
aaaggaggacatttcargtggaataacagcttg

SEQ ID NO: 1042 - DNA, 33 bp, homo sapiens
actggagaaaaataaargggaatcttcagtttg

SEQ ID NO: 1043 - DNA, 33 bp, homo sapiens
ggcaaacttttttccarctgaacaaactgatgc

SEQ ID NO: 1044 - DNA, 33 bp, homo sapiens
ttctgcagttatatcaygaaaattcctagaaag

SEQ ID NO: 1045 - DNA, 33 bp, homo sapiens
atagccctttgttacaycactgcaccatacctt

SEQ ID NO: 1046 - DNA, 33 bp, homo sapiens
catattatcacatatcrcagtgtctgcttatca

SEQ ID NO: 1047 - DNA, 33 bp, homo sapiens
gaaatttcgagaaagawcatagacagagaaagt

SEQ ID NO: 1048 - DNA, 33 bp, homo sapiens
ctttctgaagctaaacsagtaattttaaagctt

SEQ ID NO: 1049 - DNA, 33 bp, homo sapiens
gaattctcttctattasaggtaggcacactagc

SEQ ID NO: 1050 - DNA, 33 bp, homo sapiens
aagaaacataaagaaartgacaccagggcatat

SEQ ID NO: 1051 - DNA, 33 bp, homo sapiens
ggcttattcttccagakcataagtgagccacct

SEQ ID NO: 1052 - DNA, 33 bp, homo sapiens
cgtggcacagtgcctasagacacacaaacaatc

SEQ ID NO: 1053 - DNA, 33 bp, homo sapiens
acttagaagagtaaaawtctgtccaaatgtatt

SEQ ID NO: 1054 - DNA, 33 bp, homo sapiens
ccatggtagtatctcayggcatagttatcctga

SEQ ID NO: 1055 - DNA, 33 bp, homo sapiens
gctggagagtctgaacraatttcttcaccaggg

SEQ ID NO: 1056 - DNA, 33 bp, homo sapiens
tttggtgaggtgtccaktcaaacttttccttat

SEQ ID NO: 1057 - DNA, 33 bp, homo sapiens
attgcctataaaatcasgaaaaattcttggtgg

SEQ ID NO: 1058 - DNA, 33 bp, homo sapiens
ttttcgaagaggtaaargttctgcgctggcctg

SEQ ID NO: 1059 - DNA, 33 bp, homo sapiens
gtcagcacaaatgtccygaggtgagatagtact

SEQ ID NO: 1060 - DNA, 33 bp, homo sapiens
atgtgataccaaacaamcagtccaatccagcaa

SEQ ID NO: 1061 - DNA, 33 bp, homo sapiens
tttctacaatcttctcyaatcacttcccagcca

SEQ ID NO: 1062 - DNA, 33 bp, homo sapiens
tggtttaggctgaaacrcctgggattgcttttc

SEQ ID NO: 1063 - DNA, 33 bp, homo sapiens
ttctattcactcttcaygataggtgatatactc

SEQ ID NO: 1064 - DNA, 33 bp, homo sapiens
atgtcccaaagctccamtatctatttactttgg

SEQ ID NO: 1065 - DNA, 33 bp, homo sapiens
aacttatttaaattgcyatgcctgtcattgggt

SEQ ID NO: 1066 - DNA, 33 bp, homo sapiens
ctcatttgtgtccctgraagagataaggagaga

SEQ ID NO: 1067 - DNA, 33 bp, homo sapiens
ttcctgcaggagagaaygcagtagctgatgaaa

SEQ ID NO: 1068 - DNA, 33 bp, homo sapiens
acatttccatcattccyaaaacctttacccttc

SEQ ID NO: 1069 - DNA, 33 bp, homo sapiens
accatctactgtgaacsagatccagttggtata

SEQ ID NO: 1070 - DNA, 33 bp, homo sapiens
gcattttcatctgaccyactatatttcacttaa

SEQ ID NO: 1071 - DNA, 33 bp, homo sapiens
gaatgtaaaaaaaacakaacactcagatactaa

SEQ ID NO: 1072 - DNA, 33 bp, homo sapiens
cccatcgccgtggtgawtatcaatgtcaatata

SEQ ID NO: 1073 - DNA, 33 bp, homo sapiens
tctggactactgcagawgttaatctttttccag

SEQ ID NO: 1074 - DNA, 33 bp, homo sapiens
cttcgctttgtctcaayctatctgtagtttcaa

SEQ ID NO: 1075 - DNA, 33 bp, homo sapiens
taatgcctctctcacarggttttagctaagacc

SEQ ID NO: 1076 - DNA, 33 bp, homo sapiens
atcacaacttctctgakaaatgacaacaggact

SEQ ID NO: 1077 - DNA, 33 bp, homo sapiens
ttatgggtctagtataraaagcttataaactgt

SEQ ID NO: 1078 - DNA, 33 bp, homo sapiens
gaaagaggtcaatgtcrcagtataatccatcgc

SEQ ID NO: 1079 - DNA, 33 bp, homo sapiens
gggagaggttgtaaacygaatacctgcacatct

SEQ ID NO: 1080 - DNA, 33 bp, homo sapiens
ttgattttgaatgctamatttttttctctgtct

SEQ ID NO: 1081 - DNA, 33 bp, homo sapiens
gccattggcacgataasgatttgtctggaaaaa

SEQ ID NO: 1082 - DNA, 33 bp, homo sapiens
aggaatagcataagtaycacagggtataggtag

SEQ ID NO: 1083 - DNA, 33 bp, homo sapiens
gagaaatacccatcccractatgaaagttttca

SEQ ID NO: 1084 - DNA, 33 bp, homo sapiens
ctagtagagacagctcragtggctagtcaggag

SEQ ID NO: 1085 - DNA, 33 bp, homo sapiens
ctcgaactcccgaactyaggtgaccataccgcc

SEQ ID NO: 1086 - DNA, 33 bp, homo sapiens
cacaaggagattcataraagaaagaggctgggt

SEQ ID NO: 1087 - DNA, 33 bp, homo sapiens
tatgtaggctttcactsaggacaggtagatttt

SEQ ID NO: 1088 - DNA, 33 bp, homo sapiens
ataatgagtagttcaaygaggccagcggacagc

SEQ ID NO: 1089 - DNA, 33 bp, homo sapiens
cctaacatctgcttcaragtttaacaacacctt

SEQ ID NO: 1090 - DNA, 33 bp, homo sapiens
aaattctagcaaggaargtagatgaaagaacat

SEQ ID NO: 1091 - DNA, 33 bp, homo sapiens
tctagggagagaaacaytgtgtataaagacaca

SEQ ID NO: 1092 - DNA, 33 bp, homo sapiens
gcttgttcagaatgcartatgtataaagccatt

SEQ ID NO: 1093 - DNA, 33 bp, homo sapiens
ttctgctgaccgccaakattataccctttctgc

SEQ ID NO: 1094 - DNA, 33 bp, homo sapiens
tcacacagccacagaarattacactcagagaca

SEQ ID NO: 1095 - DNA, 33 bp, homo sapiens
acccagagaagttgacrgcagacagatgttgcc

SEQ ID NO: 1096 - DNA, 33 bp, homo sapiens
ggtaggcggggaacackcagcaagaacagctct

SEQ ID NO: 1097 - DNA, 33 bp, homo sapiens
catgaagcctgcttagyagaggggctcaaactt

SEQ ID NO: 1098 - DNA, 33 bp, homo sapiens
tcctaagcaaaccggcmaaagagctactaaatt

SEQ ID NO: 1099 - DNA, 33 bp, homo sapiens
aatattattctcttgcycaactggcgtgcctct

SEQ ID NO: 1100 - DNA, 33 bp, homo sapiens
tgctatacttgccttakcgctctctttttcttt

SEQ ID NO: 1101 - DNA, 33 bp, homo sapiens
ctactttctgtgtccayagtgttgcctgttaca

SEQ ID NO: 1102 - DNA, 33 bp, homo sapiens
gaagatgagtctctcastgactggggaagctct

SEQ ID NO: 1103 - DNA, 33 bp, homo sapiens
cgtagatgacttcaacrgaccgagagaaagaag

SEQ ID NO: 1104 - DNA, 33 bp, homo sapiens
atgttgcaagaagctaygcaaacagattgttaa

SEQ ID NO: 1105 - DNA, 33 bp, homo sapiens
atcttctgtgggtaggratttagataggacaca

SEQ ID NO: 1106 - DNA, 33 bp, homo sapiens
taaggtgctcagtccayagcagggacatagaca

SEQ ID NO: 1107 - DNA, 33 bp, homo sapiens
gagccacttctggtcawcttcggtgagcagaca

SEQ ID NO: 1108 - DNA, 33 bp, homo sapiens
tacagcctttcttccaycccaatacagcatggt

SEQ ID NO: 1109 - DNA, 33 bp, homo sapiens
gaggagcctttaggaakcacttgggtcatgaat

SEQ ID NO: 1110 - DNA, 33 bp, homo sapiens
caaactgttcccctacraataatgtgttggtct

SEQ ID NO: 1111 - DNA, 33 bp, homo sapiens
caggacagatcaaaccrcacaggctttgaagac

SEQ ID NO: 1112 - DNA, 33 bp, homo sapiens
aagtgaattgacagaakatacggtttacctaga

SEQ ID NO: 1113 - DNA, 33 bp, homo sapiens
ctggcctcataaagtawatccattttcttgggt

SEQ ID NO: 1114 - DNA, 33 bp, homo sapiens
gggttttcatgatgcargtcttcaccagagtgc

SEQ ID NO: 1115 - DNA, 33 bp, homo sapiens
gaactctggggatcccyaaaatacagtctggta

SEQ ID NO: 1116 - DNA, 33 bp, homo sapiens
aatgcaatagcttagakagttaattgcttgtcc

SEQ ID NO: 1117 - DNA, 33 bp, homo sapiens
agagtttactagaagawtatctccaaggccaat

SEQ ID NO: 1118 - DNA, 33 bp, homo sapiens
tgggggtaataaaaacracagcaggaatctctg

SEQ ID NO: 1119 - DNA, 33 bp, homo sapiens
tggtacctaccaatccrataaaatatctaatga

SEQ ID NO: 1120 - DNA, 33 bp, homo sapiens
ttcattaattgatgagwactgtgcctcgctgag

SEQ ID NO: 1121 - DNA, 33 bp, homo sapiens
attttcttgagagagakaaacattttcttagcc

SEQ ID NO: 1122 - DNA, 33 bp, homo sapiens
aaacattatcatccagrctaaggcacctgtgag

SEQ ID NO: 1123 - DNA, 33 bp, homo sapiens
aaatgtgaaaatcaacsaaatgtttatcaactg

SEQ ID NO: 1124 - DNA, 33 bp, homo sapiens
tgaggaagcagaggccraagcagtgttgttccc

SEQ ID NO: 1125 - DNA, 33 bp, homo sapiens
gtccagctgagcagaarcgtctgtgtcacactg

SEQ ID NO: 1126 - DNA, 33 bp, homo sapiens
agaggcagcttctgackcaatgtggaccctcaa

SEQ ID NO: 1127 - DNA, 33 bp, homo sapiens
aaccctatgtagaaaasgcttccaaaagtacaa

SEQ ID NO: 1128 - DNA, 33 bp, homo sapiens
ccaaagaaaactaggcyagggaaatacttgaac

SEQ ID NO: 1129 - DNA, 33 bp, homo sapiens
taattcccaaggcaacygtgtcgagaggcggga

SEQ ID NO: 1130 - DNA, 33 bp, homo sapiens
aaccaaatggagaaaaytggaatcagccacact

SEQ ID NO: 1131 - DNA, 33 bp, homo sapiens
agagagtgaaccaaatraaggctagaaatcttg

SEQ ID NO: 1132 - DNA, 33 bp, homo sapiens
atcactgttactgtcargtcaattccacgtcaa

SEQ ID NO: 1133 - DNA, 33 bp, homo sapiens
caaagaattttacccartggacctctgatcgat

SEQ ID NO: 1134 - DNA, 33 bp, homo sapiens
cacgaacaaaccatcartcattgcctggatttc

SEQ ID NO: 1135 - DNA, 33 bp, homo sapiens
tttctgatctgtgtcayctgtaaaactacaacg

SEQ ID NO: 1136 - DNA, 33 bp, homo sapiens
ttccgacttagaagatwaccctaattactatat

SEQ ID NO: 1137 - DNA, 33 bp, homo sapiens
gcatgtttctaaaaacrcttcaggaatccagag

SEQ ID NO: 1138 - DNA, 33 bp, homo sapiens
ttgccaaggactctaaygatactgagactttat

SEQ ID NO: 1139 - DNA, 33 bp, homo sapiens
ctccacatcaagcggaycaactactattgtctg

SEQ ID NO: 1140 - DNA, 33 bp, homo sapiens
gttcatgtaggcccaayataatttattatgaaa

SEQ ID NO: 1141 - DNA, 33 bp, homo sapiens
tcctctttttgtaaacygtcataattcttgatt

SEQ ID NO: 1142 - DNA, 33 bp, homo sapiens
agttggcgagtgggacrctgttgagctttgttg

SEQ ID NO: 1143 - DNA, 33 bp, homo sapiens
caaacacaagatctaartcaagctactcaataa

SEQ ID NO: 1144 - DNA, 33 bp, homo sapiens
ggcaaaaatgaacacayggtactggatgaaatt

SEQ ID NO: 1145 - DNA, 33 bp, homo sapiens
acctcaaagaaataaaygctgccaataactgga

SEQ ID NO: 1146 - DNA, 33 bp, homo sapiens
tgcattcaagttaaaaygaaatgattcaacact

SEQ ID NO: 1147 - DNA, 33 bp, homo sapiens
gagccctagtctcaacrgtgattagacctcacc

SEQ ID NO: 1148 - DNA, 33 bp, homo sapiens
cctccaccactgaacasagctataaaacctaga

SEQ ID NO: 1149 - DNA, 33 bp, homo sapiens
aagacttttccgtttgyagaatttgtatgaaag

SEQ ID NO: 1150 - DNA, 33 bp, homo sapiens
agtcattaatgaaccarccacaagcttgtctcc

SEQ ID NO: 1151 - DNA, 33 bp, homo sapiens
aagagaggtttggctgyaactgggtcccagttg

SEQ ID NO: 1152 - DNA, 33 bp, homo sapiens
tccttgagcctatgaamcccctcctgcatctcc

SEQ ID NO: 1153 - DNA, 33 bp, homo sapiens
caagcacttgagttctyagaaatagatggcaac

SEQ ID NO: 1154 - DNA, 33 bp, homo sapiens
ttttcattatgaatcakcacggtcatttagtca

SEQ ID NO: 1155 - DNA, 33 bp, homo sapiens
atttaatggtggctcarcattccactattcaga

SEQ ID NO: 1156 - DNA, 33 bp, homo sapiens
ttattcctcaaaaacayggggcaagcttactgc

SEQ ID NO: 1157 - DNA, 33 bp, homo sapiens
acccagcacttacataycaaagagaagtggtgg

SEQ ID NO: 1158 - DNA, 33 bp, homo sapiens
acatttaagttgggaayattgtcgaaactctgc

SEQ ID NO: 1159 - DNA, 33 bp, homo sapiens
gtaattcgcaggtatcragagccagaggcctca

SEQ ID NO: 1160 - DNA, 33 bp, homo sapiens
acaacctatggtccccygaattcaccttagttt

SEQ ID NO: 1161 - DNA, 33 bp, homo sapiens
accaagaatgttcttgycaaagtcaatggcatt

SEQ ID NO: 1162 - DNA, 33 bp, homo sapiens
tggattggattggaagraagatacagagaaagg

SEQ ID NO: 1163 - DNA, 33 bp, homo sapiens
gtttcagccagcatccraatagtgacaaggcac

SEQ ID NO: 1164 - DNA, 33 bp, homo sapiens
ggcactcttcagcctaycaaatataaatgcaga

SEQ ID NO: 1165 - DNA, 33 bp, homo sapiens
tggcccagttggtgtargagcttggggatgatt

SEQ ID NO: 1166 - DNA, 33 bp, homo sapiens
gaaatattgtgggctaygaaaaggttattctgc

SEQ ID NO: 1167 - DNA, 33 bp, homo sapiens
ctaataagggcaagaargtatggaaagttatat

SEQ ID NO: 1168 - DNA, 33 bp, homo sapiens
tagaaaaaaaaatgccragattacacacattgc

SEQ ID NO: 1169 - DNA, 33 bp, homo sapiens
aaaacatgaccttcacmatctgagctaacaaaa

SEQ ID NO: 1170 - DNA, 33 bp, homo sapiens
gagcaacccttgttacyaattacatgagtgaca

SEQ ID NO: 1171 - DNA, 33 bp, homo sapiens
tcacatttaatgtgccyggagataaaacacagg

SEQ ID NO: 1172 - DNA, 33 bp, homo sapiens
agaaggaaagagtgggyaatcctgctttatgaa

SEQ ID NO: 1173 - DNA, 33 bp, homo sapiens
gaaatataaccactgayatagtagcatacacta

SEQ ID NO: 1174 - DNA, 33 bp, homo sapiens
agctactatggagagakatgtacttcataaatg

SEQ ID NO: 1175 - DNA, 33 bp, homo sapiens
ctgccccctaaatcggmaactctggaggtgctt

SEQ ID NO: 1176 - DNA, 33 bp, homo sapiens
tgttgaaatactccaartaactgtagaacatgg

SEQ ID NO: 1177 - DNA, 33 bp, homo sapiens
ggcattgcattatgaawatggtttatgcaagag

SEQ ID NO: 1178 - DNA, 33 bp, homo sapiens
aaattactagattttcrcaggcaaaagagttgt

SEQ ID NO: 1179 - DNA, 33 bp, homo sapiens
caagcatgggaaggaayaggcttgaggagttag

SEQ ID NO: 1180 - DNA, 33 bp, homo sapiens
caaatccaccgataagsaagttcatcatttact

SEQ ID NO: 1181 - DNA, 33 bp, homo sapiens
cagagcaattacaaacyatcagacgagaatgtc

SEQ ID NO: 1182 - DNA, 33 bp, homo sapiens
ttagaaactagcaatcragacaaataaggatag

SEQ ID NO: 1183 - DNA, 33 bp, homo sapiens
aatctagcaaaagaacraagttggaagcctcct

SEQ ID NO: 1184 - DNA, 33 bp, homo sapiens
attcactttgtctagcratcaaatgcttgtgaa

SEQ ID NO: 1185 - DNA, 33 bp, homo sapiens
taggaatatatgtaacsaaggacgtgaaagatc

SEQ ID NO: 1186 - DNA, 33 bp, homo sapiens
tgaatcacacactctcrgaaaggaccttagatt

SEQ ID NO: 1187 - DNA, 33 bp, homo sapiens
acagatgtctctttcakaagccacacctcctcc

SEQ ID NO: 1188 - DNA, 33 bp, homo sapiens
agtaacaactgatgtcyctatacttggttgaat

SEQ ID NO: 1189 - DNA, 33 bp, homo sapiens
tctaagtaaattttgaytagcatttcttcttcc

SEQ ID NO: 1190 - DNA, 33 bp, homo sapiens
cttaaaatgcaagaacrgaaatcaggaaacatt

SEQ ID NO: 1191 - DNA, 33 bp, homo sapiens
tatagcttcattaggcraagagactctattcct

SEQ ID NO: 1192 - DNA, 33 bp, homo sapiens
cttagaaagcaaatggraagagggttttaagag

SEQ ID NO: 1193 - DNA, 33 bp, homo sapiens
ataacttaggttataaygcctttatacagcctt

SEQ ID NO: 1194 - DNA, 33 bp, homo sapiens
cattggctaagttccayactgtagaaaacactg

SEQ ID NO: 1195 - DNA, 33 bp, homo sapiens
tttactccagtctctcrcctgtgcaccaaccac

SEQ ID NO: 1196 - DNA, 33 bp, homo sapiens
ggtcttggaaaccgttsaaaggatcttgggact

SEQ ID NO: 1197 - DNA, 33 bp, homo sapiens
gatctctcaagtctgaygttttaataactagca

SEQ ID NO: 1198 - DNA, 33 bp, homo sapiens
gaatgcttccaagtaartgcattctggacaaaa

SEQ ID NO: 1199 - DNA, 33 bp, homo sapiens
ttcgccgtgtttctcaytataaagttactattt

SEQ ID NO: 1200 - DNA, 33 bp, homo sapiens
gaataatattgcatgaygggcgtgtactatgtt

SEQ ID NO: 1201 - DNA, 33 bp, homo sapiens
tgcagtagcatcctaaytggcagtcctgtttct

SEQ ID NO: 1202 - DNA, 33 bp, homo sapiens
attgctatcactgaggyacttggtttcttaagc

SEQ ID NO: 1203 - DNA, 33 bp, homo sapiens
agctataggaaaaagcratgtagattaatagga

SEQ ID NO: 1204 - DNA, 33 bp, homo sapiens
tgaaggaacataagacyggagagccaaagagag

SEQ ID NO: 1205 - DNA, 33 bp, homo sapiens
aacttggaacaattcawacaaaaagggcgaaga

SEQ ID NO: 1206 - DNA, 33 bp, homo sapiens
cactgtgggggagaagraatacgcggagtcaat

SEQ ID NO: 1207 - DNA, 33 bp, homo sapiens
aggcctcggaaaatgarctggtgtcagctgctg

SEQ ID NO: 1208 - DNA, 33 bp, homo sapiens
taggtttccttctggcratacctaaggccatcg

SEQ ID NO: 1209 - DNA, 33 bp, homo sapiens
ttagaaaaaacgaagargcaagccaaggcagac

SEQ ID NO: 1210 - DNA, 33 bp, homo sapiens
tcaagaaaagctcagcragatcagagaggagtt

SEQ ID NO: 1211 - DNA, 33 bp, homo sapiens
tcattggtgccaaataygccagatgttctattt

SEQ ID NO: 1212 - DNA, 33 bp, homo sapiens
ggatactctgagtaagsaaggtggatgagattg

SEQ ID NO: 1213 - DNA, 33 bp, homo sapiens
atgaatgaaggaatggkcaatataggtgagaat

SEQ ID NO: 1214 - DNA, 33 bp, homo sapiens
ttaggtcgaaggcaaaygaagaatttgtttttg

SEQ ID NO: 1215 - DNA, 33 bp, homo sapiens
caactgtagtggataaygtcaagttgtttttct

SEQ ID NO: 1216 - DNA, 33 bp, homo sapiens
gagatgaattccaaaartctatatctctagata

SEQ ID NO: 1217 - DNA, 33 bp, homo sapiens
aggagtgagtcggagayatggatagatcgattt

SEQ ID NO: 1218 - DNA, 33 bp, homo sapiens
gtggaatttaggaaackgctgtaggaattactt

SEQ ID NO: 1219 - DNA, 33 bp, homo sapiens
gattgacctcccacgcsaatttctagaggcctg

SEQ ID NO: 1220 - DNA, 33 bp, homo sapiens
cttactgctcatctgayatagttaccccaaatc

SEQ ID NO: 1221 - DNA, 33 bp, homo sapiens
ataagatagcgcacggrattgctaggcgcattc

SEQ ID NO: 1222 - DNA, 33 bp, homo sapiens
agcatctaaaatgagaycactacatcagggaag

SEQ ID NO: 1223 - DNA, 33 bp, homo sapiens
ttgaggatagtctaaaytacattctcagcttga

SEQ ID NO: 1224 - DNA, 33 bp, homo sapiens
cattaaattgtacacaycatattgagtcttttt

SEQ ID NO: 1225 - DNA, 33 bp, homo sapiens
acaatcttcagttctaygatggcagagaaagcg

SEQ ID NO: 1226 - DNA, 33 bp, homo sapiens
ttcatataactggaatsaaatagtgtttatctt

SEQ ID NO: 1227 - DNA, 33 bp, homo sapiens
ttcgaggtaccttcccrccagcaaccttgttct

SEQ ID NO: 1228 - DNA, 33 bp, homo sapiens
gtttctctgcatcttcrctaacctttgctgtta

SEQ ID NO: 1229 - DNA, 33 bp, homo sapiens
aagtttctaatgtccastaaacaaattgtcatg

SEQ ID NO: 1230 - DNA, 33 bp, homo sapiens
ttgacttttttggcctracatttgagttctgga

SEQ ID NO: 1231 - DNA, 33 bp, homo sapiens
attaaaccattcaccaratatcctgtctagatt

SEQ ID NO: 1232 - DNA, 33 bp, homo sapiens
ccaatgtattgacacastgaaaaaggtatgaca

SEQ ID NO: 1233 - DNA, 33 bp, homo sapiens
caaacctagaattcttraaccccaccaacacag

SEQ ID NO: 1234 - DNA, 33 bp, homo sapiens
taaagacactagtaacwggatattactacaaac

SEQ ID NO: 1235 - DNA, 33 bp, homo sapiens
ttgacttcccatcttayaaactgccatgcaatc

SEQ ID NO: 1236 - DNA, 33 bp, homo sapiens
actttttcatctttacrcttccttttcagagtt

SEQ ID NO: 1237 - DNA, 33 bp, homo sapiens
ggacttccatcagtaamctcttctgagatccct

SEQ ID NO: 1238 - DNA, 33 bp, homo sapiens
gttaatctgtcttgtaycaatttgtttcctaga

SEQ ID NO: 1239 - DNA, 33 bp, homo sapiens
ctcttttgcaacgtccrattctctacacttaca

SEQ ID NO: 1240 - DNA, 33 bp, homo sapiens
atgatttgcctctacastcacctgcagtccttg

SEQ ID NO: 1241 - DNA, 33 bp, homo sapiens
agcctccacaggagcaygggcatattggttcaa

SEQ ID NO: 1242 - DNA, 33 bp, homo sapiens
gctgtgctactgagacrgggactagacagatac

SEQ ID NO: 1243 - DNA, 33 bp, homo sapiens
agccatgggtcattcckaatgcagacagtttgc

SEQ ID NO: 1244 - DNA, 33 bp, homo sapiens
ctattcagggataaccrcacgtaacatcataat

SEQ ID NO: 1245 - DNA, 33 bp, homo sapiens
cataacaacactgcaaygggcaaagcttcacct

SEQ ID NO: 1246 - DNA, 33 bp, homo sapiens
tcagtccgtggaaacaraggtactgaacaccca

SEQ ID NO: 1247 - DNA, 33 bp, homo sapiens
ctaattgctcaccaccyactacaagctcagtgc

SEQ ID NO: 1248 - DNA, 33 bp, homo sapiens
tgaagttgcatcccagsaaaaggaaactgtacc

SEQ ID NO: 1249 - DNA, 33 bp, homo sapiens
aatccatccaatgttaygagtgacagaaaagtc

SEQ ID NO: 1250 - DNA, 33 bp, homo sapiens
ccttctcagaggacaaygtatgtaacgcgacat

SEQ ID NO: 1251 - DNA, 33 bp, homo sapiens
catgaggccaacgtcasattagcttattaaatt

SEQ ID NO: 1252 - DNA, 33 bp, homo sapiens
ctgcttcaaaaaacaamcaggtctgccaggtgg

SEQ ID NO: 1253 - DNA, 33 bp, homo sapiens
ttgtcactgaaaaatgraaattgactatgggag

SEQ ID NO: 1254 - DNA, 33 bp, homo sapiens
gtttgtttttacactaygtctaagcaaccctga

SEQ ID NO: 1255 - DNA, 33 bp, homo sapiens
tggatgccgtgaggccrctggagacggtgcgtt

SEQ ID NO: 1256 - DNA, 33 bp, homo sapiens
aggatttgagccaggaraaagtcattaagacaa

SEQ ID NO: 1257 - DNA, 33 bp, homo sapiens
gctgagtggaaaaagcraacctcaaaagtttac

SEQ ID NO: 1258 - DNA, 33 bp, homo sapiens
ggatttggttctgctawcaagttactgttttta

SEQ ID NO: 1259 - DNA, 33 bp, homo sapiens
ctgccttctggaaaaaygtcaccctgccgcctt

SEQ ID NO: 1260 - DNA, 33 bp, homo sapiens
tatttactgtgaagacsgaaaaagcgtttattc

SEQ ID NO: 1261 - DNA, 33 bp, homo sapiens
cttcctggtttatagaygactgtgttttcacat

SEQ ID NO: 1262 - DNA, 33 bp, homo sapiens
tcgctacgataagaagmagcataacgtcccaca

SEQ ID NO: 1263 - DNA, 33 bp, homo sapiens
ctaggccgctgtaacaragtaccacaagctgag

SEQ ID NO: 1264 - DNA, 33 bp, homo sapiens
ttagcaactgacttacraaattcttaaaaactg

SEQ ID NO: 1265 - DNA, 33 bp, homo sapiens
ggccaggtttttgtcamctacaagatagaaaat

SEQ ID NO: 1266 - DNA, 33 bp, homo sapiens
cactatgaaaattcccrcaaagtctgccctttg

SEQ ID NO: 1267 - DNA, 33 bp, homo sapiens
aaatgtttggattctaygccctggtctgatgga

SEQ ID NO: 1268 - DNA, 33 bp, homo sapiens
atatatttttaagttcwaaatggaccaccaaat

SEQ ID NO: 1269 - DNA, 33 bp, homo sapiens
acacagaaagatctgaygatactgaggcgcatc

SEQ ID NO: 1270 - DNA, 33 bp, homo sapiens
ccacctgtaagtcagtraaaaggctccgagagg

SEQ ID NO: 1271 - DNA, 33 bp, homo sapiens
aagagaggttgttacgraactggcaactgccaa

SEQ ID NO: 1272 - DNA, 33 bp, homo sapiens
ctctttcagactaagarcatagattggttttag

SEQ ID NO: 1273 - DNA, 33 bp, homo sapiens
ggccgtgtgtgagtacyggaaactgttaacttc

SEQ ID NO: 1274 - DNA, 33 bp, homo sapiens
atactaagccagcccaygttaagcttgcatgtg

SEQ ID NO: 1275 - DNA, 33 bp, homo sapiens
cagatttggaaagaaaygtctcctgtgccttcc

SEQ ID NO: 1276 - DNA, 33 bp, homo sapiens
acactgttcctcctgawattcactagaggaatg

SEQ ID NO: 1277 - DNA, 33 bp, homo sapiens
ttaaagagaccaaaagwctatggtagcagcatt

SEQ ID NO: 1278 - DNA, 33 bp, homo sapiens
ctgatgtccctgcagckaactcaggaagcatcc

SEQ ID NO: 1279 - DNA, 33 bp, homo sapiens
tagatccacaacgggawagtgacttgtgcaggg

SEQ ID NO: 1280 - DNA, 33 bp, homo sapiens
attcaaagtgtccaaamgtgtgtttattataac

SEQ ID NO: 1281 - DNA, 33 bp, homo sapiens
attgatttattatgaaygtaaagggtgtgtctg

SEQ ID NO: 1282 - DNA, 33 bp, homo sapiens
cacggtaaaactgcaastagcttagaggataat

SEQ ID NO: 1283 - DNA, 33 bp, homo sapiens
gtgattcaagggtaagyaatctccaaatcaatg

SEQ ID NO: 1284 - DNA, 33 bp, homo sapiens
acgtggttgaccttgcrctcttaactgctccac

SEQ ID NO: 1285 - DNA, 33 bp, homo sapiens
atagtagaggcattacyacaggaaaaaaatagt

SEQ ID NO: 1286 - DNA, 33 bp, homo sapiens
cacacttttgcatagakctgaccctcaacaagt

SEQ ID NO: 1287 - DNA, 33 bp, homo sapiens
cttagtgttctcttgcycttgaaataaaatata

SEQ ID NO: 1288 - DNA, 33 bp, homo sapiens
caatcatgcctactcaytctatacatctatttg

SEQ ID NO: 1289 - DNA, 33 bp, homo sapiens
acttaacacattttgcrgatctttccatttgaa

SEQ ID NO: 1290 - DNA, 33 bp, homo sapiens
ctgtggcctaataccamtgacagaccatctcac

SEQ ID NO: 1291 - DNA, 33 bp, homo sapiens
aatgacctggataatakctgggtgaaagaaaaa

SEQ ID NO: 1292 - DNA, 33 bp, homo sapiens
gcataattttgaaataygggattgtgaagagag

SEQ ID NO: 1293 - DNA, 33 bp, homo sapiens
gattaaaagacaaatgyaatccgcagaatggtt

SEQ ID NO: 1294 - DNA, 33 bp, homo sapiens
tttttgcagtaggagcyaataaacaaagtagtg

SEQ ID NO: 1295 - DNA, 33 bp, homo sapiens
ttaagtggacaaactaygacaaatctgaagcaa

SEQ ID NO: 1296 - DNA, 33 bp, homo sapiens
ttgagaaactgactacragttgatctggatggc

SEQ ID NO: 1297 - DNA, 33 bp, homo sapiens
taagaaagcagagccaygtaacctgtggtccca

SEQ ID NO: 1298 - DNA, 33 bp, homo sapiens
agccaccgagccaggcygatccattattttctt

SEQ ID NO: 1299 - DNA, 33 bp, homo sapiens
tgtggagggccacaaarcacctcttgtcataca

SEQ ID NO: 1300 - DNA, 33 bp, homo sapiens
atatatcatcatctaaytgtttttgcccctata

SEQ ID NO: 1301 - DNA, 33 bp, homo sapiens
gattactattgtctacscttgaaggccagccaa

SEQ ID NO: 1302 - DNA, 33 bp, homo sapiens
ggacagcggggatccartcagcacagttcacag

SEQ ID NO: 1303 - DNA, 33 bp, homo sapiens
ctagacaacacttgtcygaacgtcaaaatgtcc

SEQ ID NO: 1304 - DNA, 33 bp, homo sapiens
tcatgtcctgcacagcraggcagtaggcctata

SEQ ID NO: 1305 - DNA, 33 bp, homo sapiens
ctcttggcaccgccgcygatgttgacatctgca

SEQ ID NO: 1306 - DNA, 33 bp, homo sapiens
tggtctgtacatctgargtataaaatatcttta

SEQ ID NO: 1307 - DNA, 33 bp, homo sapiens
attcccctgctctcatraactcactaaagcttt

SEQ ID NO: 1308 - DNA, 33 bp, homo sapiens
aaggctaaaatatgccraatatgctctaagaca

SEQ ID NO: 1309 - DNA, 33 bp, homo sapiens
cactctattcctttgarctgattaattgactgg

SEQ ID NO: 1310 - DNA, 33 bp, homo sapiens
cttcttggaaccatgargagagctgggccaaca

SEQ ID NO: 1311 - DNA, 33 bp, homo sapiens
ctgagttcaagcaggayaccatacagaaagagc

SEQ ID NO: 1312 - DNA, 33 bp, homo sapiens
atagaaggaacctgacsagaaacagtacattcc

SEQ ID NO: 1313 - DNA, 33 bp, homo sapiens
catctgaacagctgatkataggctttcttgaga

SEQ ID NO: 1314 - DNA, 33 bp, homo sapiens
aatggaatcctttagaraatcagctcagatgac

SEQ ID NO: 1315 - DNA, 33 bp, homo sapiens
aaggttgtggtcttaarggacatagttgcacat

SEQ ID NO: 1316 - DNA, 33 bp, homo sapiens
gcctggtctacgcaacrcagaaggtgggcccca

SEQ ID NO: 1317 - DNA, 33 bp, homo sapiens
tatagcgagggggacaktcttttcctatgcaga

SEQ ID NO: 1318 - DNA, 33 bp, homo sapiens
cagcaactgatattccyctgttttcacaatgct

SEQ ID NO: 1319 - DNA, 33 bp, homo sapiens
acaaaaccaaatccagraagcagtccaggggtt

SEQ ID NO: 1320 - DNA, 33 bp, homo sapiens
gacaaggtaacacaaayattaactgtttctcct

SEQ ID NO: 1321 - DNA, 33 bp, homo sapiens
acctattaagacatgascttacactctgacaac

SEQ ID NO: 1322 - DNA, 33 bp, homo sapiens
agactctgcgattcagragaagagctgagaact

SEQ ID NO: 1323 - DNA, 33 bp, homo sapiens
attattttgccataaayatacacacaaacgggc

SEQ ID NO: 1324 - DNA, 33 bp, homo sapiens
ggagagcagctgagatkagaagtagccagacct

SEQ ID NO: 1325 - DNA, 33 bp, homo sapiens
ctgcctccttgccaaastcctgtcggcacttgc

SEQ ID NO: 1326 - DNA, 33 bp, homo sapiens
ttgctttgactattcarcttcttttttggttct

SEQ ID NO: 1327 - DNA, 33 bp, homo sapiens
atattcctgtgccccaraccaacaagttctttt

SEQ ID NO: 1328 - DNA, 33 bp, homo sapiens
gccaataaagatgttgsagagagagtcctctgg

SEQ ID NO: 1329 - DNA, 33 bp, homo sapiens
aacctgacttgccatayagaaatgctgtttctg

SEQ ID NO: 1330 - DNA, 33 bp, homo sapiens
tgatcatgaatttacarcaagaccagaatgttt

SEQ ID NO: 1331 - DNA, 33 bp, homo sapiens
gaagaatatgagttatraactggacgtaaagtt

SEQ ID NO: 1332 - DNA, 33 bp, homo sapiens
aacttaatctcatcaaytggggacttacactcc

SEQ ID NO: 1333 - DNA, 33 bp, homo sapiens
attcctcaagccagccrgaatctccaagttcat

SEQ ID NO: 1334 - DNA, 33 bp, homo sapiens
ccaacagccactatggracacaatcaaggaaac

SEQ ID NO: 1335 - DNA, 33 bp, homo sapiens
tgtgtagggttataaakgattaagcaaaagtgt

SEQ ID NO: 1336 - DNA, 33 bp, homo sapiens
acaattgtcaaggaaakttgttaactctgtggc

SEQ ID NO: 1337 - DNA, 33 bp, homo sapiens
tgctgaggaaaacaatkaatattctgcagccat

SEQ ID NO: 1338 - DNA, 33 bp, homo sapiens
tgtcatgttgttttcaytcagtttttatcttca

SEQ ID NO: 1339 - DNA, 33 bp, homo sapiens
aacattccagatgaackgtcacttttgcttcat

SEQ ID NO: 1340 - DNA, 33 bp, homo sapiens
acacaagtactggatakgagtcttttattacta

SEQ ID NO: 1341 - DNA, 33 bp, homo sapiens
tccccttgctcttcacygcatggattcctccca

SEQ ID NO: 1342 - DNA, 33 bp, homo sapiens
ctatcaaccttgttcamtatgttctctgctggc

SEQ ID NO: 1343 - DNA, 33 bp, homo sapiens
agcatgtggcaaataasagtgaggattcaaaac

SEQ ID NO: 1344 - DNA, 33 bp, homo sapiens
ttatgaatagagcaaasagttcccaggccaggc

SEQ ID NO: 1345 - DNA, 33 bp, homo sapiens
gattcatgataaccacratggaaaaacgtatca

SEQ ID NO: 1346 - DNA, 33 bp, homo sapiens
taagaggaatttgacamacatgtacctttctgc

SEQ ID NO: 1347 - DNA, 33 bp, homo sapiens
gaggggattgttgacckccatgacaaagcaatg

SEQ ID NO: 1348 - DNA, 33 bp, homo sapiens
tgctgaaatgatggaargagagtgtgtgaagag

SEQ ID NO: 1349 - DNA, 33 bp, homo sapiens
gtgagaatgaaagctaygtaaagtgggcagttg

SEQ ID NO: 1350 - DNA, 33 bp, homo sapiens
tatacagaatcatcaartccttttcaattatca

SEQ ID NO: 1351 - DNA, 33 bp, homo sapiens
gtcaggattcacatacrggcgcgctcctaaact

SEQ ID NO: 1352 - DNA, 33 bp, homo sapiens
gtttgtccaaaccatgmaaattctaaggacagc

SEQ ID NO: 1353 - DNA, 33 bp, homo sapiens
agtttacagtaggccartagatttctcagaaat

SEQ ID NO: 1354 - DNA, 33 bp, homo sapiens
cctttacagttttgcakcataaacagaaacatg

SEQ ID NO: 1355 - DNA, 33 bp, homo sapiens
ttaacagtggaagcagsctctcgcatacatttt

SEQ ID NO: 1356 - DNA, 33 bp, homo sapiens
tggcatacgtgtgtccycctagataagctctgc

SEQ ID NO: 1357 - DNA, 33 bp, homo sapiens
ctagtctgcagccccartactcaaagggtggtc

SEQ ID NO: 1358 - DNA, 33 bp, homo sapiens
ttgcttccttccacacycagtctcgggctcacc

SEQ ID NO: 1359 - DNA, 33 bp, homo sapiens
atgtgtacaccagtcaragtggggagaaaaaac

SEQ ID NO: 1360 - DNA, 33 bp, homo sapiens
acaaaacattgttcacracttaaagactatctg

SEQ ID NO: 1361 - DNA, 33 bp, homo sapiens
tcctgcttctctcctgyaggattgtagtgaagc

SEQ ID NO: 1362 - DNA, 33 bp, homo sapiens
gaaaaggaaaatggaaygcatatagcagatctc

SEQ ID NO: 1363 - DNA, 33 bp, homo sapiens
catctcgccctcctcastattttctattaaagt

SEQ ID NO: 1364 - DNA, 33 bp, homo sapiens
ttttacaagagctttcyaggtggacaagtctgg

SEQ ID NO: 1365 - DNA, 33 bp, homo sapiens
tgctcttagtgacacaraataccaaagtattta

SEQ ID NO: 1366 - DNA, 33 bp, homo sapiens
gtttctaaaattaatasagttgaattactggat

SEQ ID NO: 1367 - DNA, 33 bp, homo sapiens
aaatctctgaaattacygctaaagaacttatcc

SEQ ID NO: 1368 - DNA, 33 bp, homo sapiens
gttacttttacttccaytgagtccataaagggg

SEQ ID NO: 1369 - DNA, 33 bp, homo sapiens
ggatggacacctgattyaaggatgaaaagttag

SEQ ID NO: 1370 - DNA, 33 bp, homo sapiens
aggtagaaacctatgcracctttaatcaaaaca

SEQ ID NO: 1371 - DNA, 33 bp, homo sapiens
acttgtggagcctaaaragcagctggatgcagg

SEQ ID NO: 1372 - DNA, 33 bp, homo sapiens
gtcaattcctctcaaasttgtcaattgttttaa

SEQ ID NO: 1373 - DNA, 33 bp, homo sapiens
agagtgaaactgagtgmaagtcatgtaatgttt

SEQ ID NO: 1374 - DNA, 33 bp, homo sapiens
ttttcccatggccttcraaggtatccttttctt

SEQ ID NO: 1375 - DNA, 33 bp, homo sapiens
tcttatagccacaatgrattatttgtttttatt

SEQ ID NO: 1376 - DNA, 33 bp, homo sapiens
cctttttgcaagaccaragttccttgagggcaa

SEQ ID NO: 1377 - DNA, 33 bp, homo sapiens
aggagcacagctgccaragaaagtgtcaaacca

SEQ ID NO: 1378 - DNA, 33 bp, homo sapiens
aatgaaaacacaacacracatgaaacaaaaaag

SEQ ID NO: 1379 - DNA, 33 bp, homo sapiens
accttgaaacagatccygattccagcaattttc

SEQ ID NO: 1380 - DNA, 33 bp, homo sapiens
ggtcagctcagagaaaygatcccacaccttcct

SEQ ID NO: 1381 - DNA, 33 bp, homo sapiens
agtcacaggtaagacasgagagaaaaaaaggaa

SEQ ID NO: 1382 - DNA, 33 bp, homo sapiens
tggacccacagaactcyaagattttccaggctc

SEQ ID NO: 1383 - DNA, 33 bp, homo sapiens
aatggtcattgcagaayggtactttcacttttt

SEQ ID NO: 1384 - DNA, 33 bp, homo sapiens
ggttctcagagacacarggcttaggtggaggga

SEQ ID NO: 1385 - DNA, 33 bp, homo sapiens
gtatattttctttgaakaaatgcctatgtaaat

SEQ ID NO: 1386 - DNA, 33 bp, homo sapiens
gaatcataattgagtcrctttaggtcttttagc

SEQ ID NO: 1387 - DNA, 33 bp, homo sapiens
ggcaaaggattgcaacrgacatttctaaatatc

SEQ ID NO: 1388 - DNA, 33 bp, homo sapiens
tatgtggccccttctayctggaaaaacaaagaa

SEQ ID NO: 1389 - DNA, 33 bp, homo sapiens
agttattcatgttcacygagacaggctggggct

SEQ ID NO: 1390 - DNA, 33 bp, homo sapiens
gcccttgctacctctayggattagagagaggga

SEQ ID NO: 1391 - DNA, 33 bp, homo sapiens
aattataactcaacaargtaggaactgaaacaa

SEQ ID NO: 1392 - DNA, 33 bp, homo sapiens
aataattctcctgtgcmaatattatgactagtt

SEQ ID NO: 1393 - DNA, 33 bp, homo sapiens
tttcccttggctctaamattccatcactcagca

SEQ ID NO: 1394 - DNA, 33 bp, homo sapiens
tcacagcagaaggatgmaaacccatagggcatc

SEQ ID NO: 1395 - DNA, 33 bp, homo sapiens
attcctacaataaatcwcctattacgtagaact

SEQ ID NO: 1396 - DNA, 33 bp, homo sapiens
cacaagggccaggcaarggttagcagcttatag

SEQ ID NO: 1397 - DNA, 33 bp, homo sapiens
cagtgcaacatagtaawaggaatttgaaaaaga

SEQ ID NO: 1398 - DNA, 33 bp, homo sapiens
tattcttgacataagcyctcctgaggcaggaag

SEQ ID NO: 1399 - DNA, 33 bp, homo sapiens
gaccaatccaagaacawggcagcaaattgtgct

SEQ ID NO: 1400 - DNA, 33 bp, homo sapiens
aataagatgtaaatgcyaagaaattttcttgtc

SEQ ID NO: 1401 - DNA, 33 bp, homo sapiens
gcttgagtgagttggcraaatgattccccactt

SEQ ID NO: 1402 - DNA, 33 bp, homo sapiens
gacagggctttcttacrctctgttcatgtactg

SEQ ID NO: 1403 - DNA, 33 bp, homo sapiens
gggagggatcagattayggaaggcccagtaagc

SEQ ID NO: 1404 - DNA, 33 bp, homo sapiens
gggactggtatgaataygaaacacattttcaga

SEQ ID NO: 1405 - DNA, 33 bp, homo sapiens
gctaatatgaaatgtarctggcctccccctgtt

SEQ ID NO: 1406 - DNA, 33 bp, homo sapiens
aaatgaatggaagtgaractcaaagggacttgc

SEQ ID NO: 1407 - DNA, 33 bp, homo sapiens
tccataaccgagagacygaggagaagaaaatgt

SEQ ID NO: 1408 - DNA, 33 bp, homo sapiens
ggtaaaaatgtttgccyggagaaggtgtcagat

SEQ ID NO: 1409 - DNA, 33 bp, homo sapiens
aggagaaaaaagaatgsagccttttagcagggg

SEQ ID NO: 1410 - DNA, 33 bp, homo sapiens
catccacatctctttcyattacaccaaacccag

SEQ ID NO: 1411 - DNA, 33 bp, homo sapiens
cctggctaccctctgawcactctgttgcctcag

SEQ ID NO: 1412 - DNA, 33 bp, homo sapiens
cagcctcaggtggggamcacagctttctctgga

SEQ ID NO: 1413 - DNA, 33 bp, homo sapiens
ggctgcggcaacaaacraccacacagtgggtgg

SEQ ID NO: 1414 - DNA, 33 bp, homo sapiens
agtccctgggtgaacartgatgtcttggtttta

SEQ ID NO: 1415 - DNA, 33 bp, homo sapiens
cttagtctatttttggmagagctgctttattac

SEQ ID NO: 1416 - DNA, 33 bp, homo sapiens
tgaggggaagatcataygtattttcttggaaat

SEQ ID NO: 1417 - DNA, 33 bp, homo sapiens
actctgtacaatcttasgataaaagcttgaaga

SEQ ID NO: 1418 - DNA, 33 bp, homo sapiens
ttgtgttttgttcttawgtttttgtgcagaggg

SEQ ID NO: 1419 - DNA, 33 bp, homo sapiens
caaacttgctagctccyacccccactccgtgag

SEQ ID NO: 1420 - DNA, 33 bp, homo sapiens
ccagttccttatagcasaagtccccaaccccgg

SEQ ID NO: 1421 - DNA, 33 bp, homo sapiens
atctggcaaccttagcrccggggcttggatgag

SEQ ID NO: 1422 - DNA, 33 bp, homo sapiens
cccacacatatatggcyacctgatttatgacaa

SEQ ID NO: 1423 - DNA, 33 bp, homo sapiens
ggccacgtgagtttccygagtccacccaactag

SEQ ID NO: 1424 - DNA, 33 bp, homo sapiens
tactttgcaccttagakctgctccacatgtttc

SEQ ID NO: 1425 - DNA, 33 bp, homo sapiens
tgatgcgacgtgaggaraacggcaccttgcttt

SEQ ID NO: 1426 - DNA, 33 bp, homo sapiens
gtgggggaggccaaaawtttaaagtggtcacga

SEQ ID NO: 1427 - DNA, 33 bp, homo sapiens
tcctttaccaaactaasctgactctgctttggc

SEQ ID NO: 1428 - DNA, 33 bp, homo sapiens
ggaactgaagtttaatratgttgacctcctact

SEQ ID NO: 1429 - DNA, 33 bp, homo sapiens
agtcaagtactttccartcaatcattcttggaa

SEQ ID NO: 1430 - DNA, 33 bp, homo sapiens
ggaaactccacactccrgattctttctctaaaa

SEQ ID NO: 1431 - DNA, 33 bp, homo sapiens
ttcctgtgataacatcyctagacacttttgtgg

SEQ ID NO: 1432 - DNA, 33 bp, homo sapiens
gttgacacctcaaattyaaagggcctgaaacta

SEQ ID NO: 1433 - DNA, 33 bp, homo sapiens
tagtgaggaaaatgtaraagcagacatctgaag

SEQ ID NO: 1434 - DNA, 33 bp, homo sapiens
caataataacattaaaygcaaatggactaaaca

SEQ ID NO: 1435 - DNA, 33 bp, homo sapiens
gaggacgcttgaacacrcaggcctgaaactcat

SEQ ID NO: 1436 - DNA, 33 bp, homo sapiens
ggagatttgcaaagccrcatgcttgagatttat

SEQ ID NO: 1437 - DNA, 33 bp, homo sapiens
ccatgcaaaggttttayagtgaggtggcctgct

SEQ ID NO: 1438 - DNA, 33 bp, homo sapiens
ctgacggtgttccagtraaattttggtggacac

SEQ ID NO: 1439 - DNA, 33 bp, homo sapiens
tgctcaattcacatggratacgttacacagctt

SEQ ID NO: 1440 - DNA, 33 bp, homo sapiens
gcaggcagatatggccrgaacagagtaataata

SEQ ID NO: 1441 - DNA, 33 bp, homo sapiens
attcaaagaaccaaaakaaattcattgtaactg

SEQ ID NO: 1442 - DNA, 33 bp, homo sapiens
caggctatgccctggartaaatgacttgtcaag

SEQ ID NO: 1443 - DNA, 33 bp, homo sapiens
ctcttctaagtccagawaaaggctgcccaggag

SEQ ID NO: 1444 - DNA, 33 bp, homo sapiens
ggggcaattcagagtcycataagacctcatggc

SEQ ID NO: 1445 - DNA, 33 bp, homo sapiens
gttggagccactggaayttcatcacccattaag

SEQ ID NO: 1446 - DNA, 33 bp, homo sapiens
agtgtagggctctccaragagtttgcgtagggt

SEQ ID NO: 1447 - DNA, 33 bp, homo sapiens
tgggacaccgatcaaamcatgaaacaatggaac

SEQ ID NO: 1448 - DNA, 33 bp, homo sapiens
ctcagacatgtgtcacrggaagaatggtcaata

SEQ ID NO: 1449 - DNA, 33 bp, homo sapiens
actaccctacagctgakatagagtgaccaggaa

SEQ ID NO: 1450 - DNA, 33 bp, homo sapiens
ttataaaaaacataagsatgatgcagacagatt

SEQ ID NO: 1451 - DNA, 33 bp, homo sapiens
tagattcaaaattgccsgattctaatttatatt

SEQ ID NO: 1452 - DNA, 33 bp, homo sapiens
ggtctgaattagtagaratgtaggatagttatt

SEQ ID NO: 1453 - DNA, 33 bp, homo sapiens
aatcatttgaccactgratagctccagctttga

SEQ ID NO: 1454 - DNA, 33 bp, homo sapiens
tgaaaaattaagcttcrcagaataatataaaaa

SEQ ID NO: 1455 - DNA, 33 bp, homo sapiens
caccattagcataaaartgttcagagttgttat

SEQ ID NO: 1456 - DNA, 33 bp, homo sapiens
tgcctgtgcccttaagwattgtgatggctggct

SEQ ID NO: 1457 - DNA, 33 bp, homo sapiens
gtcacaagtgacagacyggtggtaaaagtgaaa

SEQ ID NO: 1458 - DNA, 33 bp, homo sapiens
tctcgtcattgcttcartcacagacaagacgaa

SEQ ID NO: 1459 - DNA, 33 bp, homo sapiens
cctcacctggaataccmcatttcccattttatt

SEQ ID NO: 1460 - DNA, 33 bp, homo sapiens
tgccttcctgaggttcygaaaattctcttagat

SEQ ID NO: 1461 - DNA, 33 bp, homo sapiens
gctaattaatgaaggamgtatgctcttatatga

SEQ ID NO: 1462 - DNA, 33 bp, homo sapiens
atggggaacccaataartgcctgtggaaaggat

SEQ ID NO: 1463 - DNA, 33 bp, homo sapiens
agatcagaaacaagatraatatacatgatggaa

SEQ ID NO: 1464 - DNA, 33 bp, homo sapiens
aaaattcaatctaagakaattgccctctaaata

SEQ ID NO: 1465 - DNA, 33 bp, homo sapiens
taaacaataacccttcwagtgtatggtttctga

SEQ ID NO: 1466 - DNA, 33 bp, homo sapiens
ttttttgctatgtctawcttttgaatgtataaa

SEQ ID NO: 1467 - DNA, 33 bp, homo sapiens
catttagtaaataaagsaagtcatagcctagtt

SEQ ID NO: 1468 - DNA, 33 bp, homo sapiens
aaagcagtctaattgakctgttgacattatctt

SEQ ID NO: 1469 - DNA, 33 bp, homo sapiens
attactccatgacaaaygactccaaggtttagg

SEQ ID NO: 1470 - DNA, 33 bp, homo sapiens
aattattcaccaaataygactaaggaaagttac

SEQ ID NO: 1471 - DNA, 33 bp, homo sapiens
aaggcaaagctatggaracacaaaaagatcagt

SEQ ID NO: 1472 - DNA, 33 bp, homo sapiens
cgctatattcctgcagracaatcattttctagc

SEQ ID NO: 1473 - DNA, 33 bp, homo sapiens
gaatccaatagaactgycaccccacatggaaga

SEQ ID NO: 1474 - DNA, 33 bp, homo sapiens
agtttagcaaaagaacrcctagatcaaatgcct

SEQ ID NO: 1475 - DNA, 33 bp, homo sapiens
gctcctacccgaagaamctataggctagaatga

SEQ ID NO: 1476 - DNA, 33 bp, homo sapiens
tttttacaccttgagayattttgctgctatgag

SEQ ID NO: 1477 - DNA, 33 bp, homo sapiens
aatgattagtgatgctsaagtgttgctttgctt

SEQ ID NO: 1478 - DNA, 33 bp, homo sapiens
ttttttggtagaatcamcaacttagatagattg

SEQ ID NO: 1479 - DNA, 33 bp, homo sapiens
cataaatatgtccacargggtgtattcagcagc

SEQ ID NO: 1480 - DNA, 33 bp, homo sapiens
ttttattgtaagctcayattggctgtaattcta

SEQ ID NO: 1481 - DNA, 33 bp, homo sapiens
tgtgttgaggacataaygaagtgatgagtgctc

SEQ ID NO: 1482 - DNA, 33 bp, homo sapiens
tgtcagaaacataacartgaggccctctctccc

SEQ ID NO: 1483 - DNA, 33 bp, homo sapiens
acaggagtaggaagtayggtagatgtatttcta

SEQ ID NO: 1484 - DNA, 33 bp, homo sapiens
tctgaataccacagcarggaaaggtatgccagc

SEQ ID NO: 1485 - DNA, 33 bp, homo sapiens
ctagtgcttattttgaygcttagtgaccatctc

SEQ ID NO: 1486 - DNA, 33 bp, homo sapiens
gagagttttggcgaggsagtgattttactttca

SEQ ID NO: 1487 - DNA, 33 bp, homo sapiens
tcatggtaagagtcgaytacccttgtgagaatt

SEQ ID NO: 1488 - DNA, 33 bp, homo sapiens
acaagctgaaaattacscataacattaccactc

SEQ ID NO: 1489 - DNA, 33 bp, homo sapiens
ctccatgcttaaagaartgtttcggagtcaaaa

SEQ ID NO: 1490 - DNA, 33 bp, homo sapiens
ttgtggacaattcaaaygacatgggtgtggttc

SEQ ID NO: 1491 - DNA, 33 bp, homo sapiens
aaggccatttatttaascaccgtgaaagaaaat

SEQ ID NO: 1492 - DNA, 33 bp, homo sapiens
gcttagaataagtcccmaaaaatgagaagtgta

SEQ ID NO: 1493 - DNA, 33 bp, homo sapiens
tcatgactgtgattacyaatatattttggggtt

SEQ ID NO: 1494 - DNA, 33 bp, homo sapiens
tggctggctcactactwagcataatttcgtaat

SEQ ID NO: 1495 - DNA, 33 bp, homo sapiens
gtactcaaaccatgaarcgtggtctttcccagt

SEQ ID NO: 1496 - DNA, 33 bp, homo sapiens
tgcacctgctatctacycttcctggacattcct

SEQ ID NO: 1497 - DNA, 33 bp, homo sapiens
ggttatccccatgaagwaaattctaagcagaaa

SEQ ID NO: 1498 - DNA, 33 bp, homo sapiens
aatgctcacagggtcaygtgctgattcaccaaa

SEQ ID NO: 1499 - DNA, 33 bp, homo sapiens
aaaatcagcaacttcarccatccagatcacgca

SEQ ID NO: 1500 - DNA, 33 bp, homo sapiens
agagacttctatgacaygatctgctaaatcagt

SEQ ID NO: 1501 - DNA, 33 bp, homo sapiens
cttcggtattcagactmactccttctctttctt

SEQ ID NO: 1502 - DNA, 33 bp, homo sapiens
tcgatgcctgcattcartcaggtactgtgtgtg

SEQ ID NO: 1503 - DNA, 33 bp, homo sapiens
tcatccatgtgcccgcraaagacatgaactcat

SEQ ID NO: 1504 - DNA, 33 bp, homo sapiens
aaatggaatccagaggkagtcaaatgatgtgtt

SEQ ID NO: 1505 - DNA, 33 bp, homo sapiens
taatgctaataaatccrggaaagaaccactcat

SEQ ID NO: 1506 - DNA, 33 bp, homo sapiens
atggctgtatagctgtyaaagaacccacagaga

SEQ ID NO: 1507 - DNA, 33 bp, homo sapiens
gaccaaaattgacccartaagattaaatggaag

SEQ ID NO: 1508 - DNA, 33 bp, homo sapiens
tgtagattttgtgtcaygttgaaaactaaaatt

SEQ ID NO: 1509 - DNA, 33 bp, homo sapiens
agtcagttaaaatccgkattcctagctcttacc

SEQ ID NO: 1510 - DNA, 33 bp, homo sapiens
ttcattttgattttccwatagtgtttcgagtct

SEQ ID NO: 1511 - DNA, 33 bp, homo sapiens
acaacacccctctgtcrcaactgatagaacaac

SEQ ID NO: 1512 - DNA, 33 bp, homo sapiens
ctcaaactagtgcatgsagaacgactagcccac

SEQ ID NO: 1513 - DNA, 33 bp, homo sapiens
ttgggtccataaccctkactcatctcacactct

SEQ ID NO: 1514 - DNA, 33 bp, homo sapiens
taaagcgcttagaagasggtcttgcacacagca

SEQ ID NO: 1515 - DNA, 33 bp, homo sapiens
agataaaagaatagaartaaccagctcccagag

SEQ ID NO: 1516 - DNA, 33 bp, homo sapiens
gtcgttaaaatgctgaraaaaggagactgacag

SEQ ID NO: 1517 - DNA, 33 bp, homo sapiens
ccctggttgcaagatargtgcctaagctattct

SEQ ID NO: 1518 - DNA, 33 bp, homo sapiens
ggagccacaacatagcrctgggaattcagcccc

SEQ ID NO: 1519 - DNA, 33 bp, homo sapiens
cttcttaagaaagatcycaagttctggtggcca

SEQ ID NO: 1520 - DNA, 33 bp, homo sapiens
ggagtcctgactcctamattcctgcctctggtc

SEQ ID NO: 1521 - DNA, 33 bp, homo sapiens
actcctcttcccaccaycatgaggtctgtaaat

SEQ ID NO: 1522 - DNA, 33 bp, homo sapiens
taacaaatcgccaccamcttagcggcttaaagc

SEQ ID NO: 1523 - DNA, 33 bp, homo sapiens
gggattgaggaggaaargaaccggatgtcaaat

SEQ ID NO: 1524 - DNA, 33 bp, homo sapiens
aggctgacttgatgacygatctgaaaaacttcg

SEQ ID NO: 1525 - DNA, 33 bp, homo sapiens
gagtccgggaaacatayaatacgagcttctcag

SEQ ID NO: 1526 - DNA, 33 bp, homo sapiens
caggcagtttagggaargacactcagttctgcc

SEQ ID NO: 1527 - DNA, 33 bp, homo sapiens
tatcaagctgtatataygtttcgacatttcata

SEQ ID NO: 1528 - DNA, 33 bp, homo sapiens
tttttagtattttagasaggatttcatcatgtt

SEQ ID NO: 1529 - DNA, 33 bp, homo sapiens
gctaggctgattggaaracaatagcatctcatt

SEQ ID NO: 1530 - DNA, 33 bp, homo sapiens
tgatctttggttatacrgtaaacagaacttatc

SEQ ID NO: 1531 - DNA, 33 bp, homo sapiens
cacttcgttgtcaaccwcttgatttttcaggct

SEQ ID NO: 1532 - DNA, 33 bp, homo sapiens
atggtcatgtacatacrcctcttaaaacagtac

SEQ ID NO: 1533 - DNA, 33 bp, homo sapiens
tctactaaacatacgawattaactgggcatggt

SEQ ID NO: 1534 - DNA, 33 bp, homo sapiens
attagtagctccattaygttaaatgatgttgaa

SEQ ID NO: 1535 - DNA, 33 bp, homo sapiens
gtctaatgagacataastggaagatttagggga

SEQ ID NO: 1536 - DNA, 33 bp, homo sapiens
tcatcgctctctcctaygtcttctctggatttt

SEQ ID NO: 1537 - DNA, 33 bp, homo sapiens
ctgtactggatttttcrcatccatcttcatttt

SEQ ID NO: 1538 - DNA, 33 bp, homo sapiens
ttattttcaacagccamcttcaattacaaatgt

SEQ ID NO: 1539 - DNA, 33 bp, homo sapiens
gccaaagcagagctaamcatttaaaagataaaa

SEQ ID NO: 1540 - DNA, 33 bp, homo sapiens
gtaattagaatttgcasctttggatgacttgcc

SEQ ID NO: 1541 - DNA, 33 bp, homo sapiens
tttctttgcagcactcraagtctgatggcaaag

SEQ ID NO: 1542 - DNA, 33 bp, homo sapiens
tctgaacacacactgcygaccatgggagggaag

SEQ ID NO: 1543 - DNA, 33 bp, homo sapiens
ctcgcatgaggccatgycatgatgatcacaggg

SEQ ID NO: 1544 - DNA, 33 bp, homo sapiens
gataagggttcgatacmctgtgaggagagaaga

SEQ ID NO: 1545 - DNA, 33 bp, homo sapiens
ctaccagccacattgcrgaagctaataactggg

SEQ ID NO: 1546 - DNA, 33 bp, homo sapiens
agtcctacagtttccayactttactgtctggag

SEQ ID NO: 1547 - DNA, 33 bp, homo sapiens
tctttacctgcaaccargagtctcataacttgg

SEQ ID NO: 1548 - DNA, 33 bp, homo sapiens
caggataagatataccyaatgaacacttatcat

SEQ ID NO: 1549 - DNA, 33 bp, homo sapiens
caggatatttgttttayctgtatcaaaagcaat

SEQ ID NO: 1550 - DNA, 33 bp, homo sapiens
tgcccgccacagtgctwagcacataaagaatac

SEQ ID NO: 1551 - DNA, 33 bp, homo sapiens
tatataggacagatgawaaaaagaattatagac

SEQ ID NO: 1552 - DNA, 33 bp, homo sapiens
aaatgaagctttgagcrgaaataaatatgaaag

SEQ ID NO: 1553 - DNA, 33 bp, homo sapiens
tatgctgaacagaaagrcctgcatattcaataa

SEQ ID NO: 1554 - DNA, 33 bp, homo sapiens
tgcagtaacaaatcccsaaaatctccagtctag

SEQ ID NO: 1555 - DNA, 33 bp, homo sapiens
ttggctcgatttcaccmgcttttattgaaactg

SEQ ID NO: 1556 - DNA, 33 bp, homo sapiens
ttttcagtggaggggaycttttcttcacagttc

SEQ ID NO: 1557 - DNA, 33 bp, homo sapiens
ccaaagcaacgctaggraaactgattttaatat

SEQ ID NO: 1558 - DNA, 33 bp, homo sapiens
taatctactatagtcargactcttcctttatcc

SEQ ID NO: 1559 - DNA, 33 bp, homo sapiens
gtgcctgcaacccttcratacatttctgatcaa

SEQ ID NO: 1560 - DNA, 33 bp, homo sapiens
ttggagagatttactakattcactaggtttact

SEQ ID NO: 1561 - DNA, 33 bp, homo sapiens
acagtggaattttttaragactacatgacatga

SEQ ID NO: 1562 - DNA, 33 bp, homo sapiens
ccctgataacctttacycctcttgtagctcaac

SEQ ID NO: 1563 - DNA, 33 bp, homo sapiens
acatctgcagattaatmatgtaaaggtgaagca

SEQ ID NO: 1564 - DNA, 33 bp, homo sapiens
agcaaaagtttcattcmcaaaccatatctttat

SEQ ID NO: 1565 - DNA, 33 bp, homo sapiens
agtcctatgcactcaargaatttaaatagcaga

SEQ ID NO: 1566 - DNA, 33 bp, homo sapiens
tgcactcaacaagatarcatacattggaagtga

SEQ ID NO: 1567 - DNA, 33 bp, homo sapiens
actcataatccacatgraaaggtagaacactgg

SEQ ID NO: 1568 - DNA, 33 bp, homo sapiens
agtaaccaaaacagtayggtattagtacaaaag

SEQ ID NO: 1569 - DNA, 33 bp, homo sapiens
ggctttgaaactctaastcacatcaaacctaca

SEQ ID NO: 1570 - DNA, 33 bp, homo sapiens
cttggtgtacactgcaygttatatcaggaactt

SEQ ID NO: 1571 - DNA, 33 bp, homo sapiens
tactttgctacatcttraagagcagcatggaat

SEQ ID NO: 1572 - DNA, 33 bp, homo sapiens
ataagctcaggtctcaraaagaaagtaaccata

SEQ ID NO: 1573 - DNA, 33 bp, homo sapiens
aaagcaatggtaagcamaattctgtgtaaacac

SEQ ID NO: 1574 - DNA, 33 bp, homo sapiens
ctgacaattgagaacastcagttttgggcagcc

SEQ ID NO: 1575 - DNA, 33 bp, homo sapiens
ggaacaaagagcttcaragattcttctgggcag

SEQ ID NO: 1576 - DNA, 33 bp, homo sapiens
aacataaacggcccacratccttatttccaaat

SEQ ID NO: 1577 - DNA, 33 bp, homo sapiens
actttgaaatgtaatcraatgaagagagcttta

SEQ ID NO: 1578 - DNA, 33 bp, homo sapiens
taccaacttggagttasgctagaagcagcagag

SEQ ID NO: 1579 - DNA, 33 bp, homo sapiens
aggtgatggcattaccyagaaacatggagttag

SEQ ID NO: 1580 - DNA, 33 bp, homo sapiens
ggctagcgataggtcasatatcagcactggctc

SEQ ID NO: 1581 - DNA, 33 bp, homo sapiens
tctatgaaaacaaaaasgctactacataaagta

SEQ ID NO: 1582 - DNA, 33 bp, homo sapiens
attgaaaactctgaaarttctgtgccatggaca

SEQ ID NO: 1583 - DNA, 33 bp, homo sapiens
tgctatttcaaaagaayagaatgtgtctgtgtg

SEQ ID NO: 1584 - DNA, 33 bp, homo sapiens
tcctggacctaactacrctactgaatgaattgg

SEQ ID NO: 1585 - DNA, 33 bp, homo sapiens
ttgattttctttgtagsatttttttgctagttg

SEQ ID NO: 1586 - DNA, 33 bp, homo sapiens
ctgctttaccaacttaygttatctgaccattgt

SEQ ID NO: 1587 - DNA, 33 bp, homo sapiens
caagaccagcccaatayacagctagagtgcaaa

SEQ ID NO: 1588 - DNA, 33 bp, homo sapiens
ggaaagggactgcatayggcttcataggttggg

SEQ ID NO: 1589 - DNA, 33 bp, homo sapiens
tgaaatacctcctgacrgaatctctcaacttac

SEQ ID NO: 1590 - DNA, 33 bp, homo sapiens
atgggatgaactgtcgraagaacaccaagagta

SEQ ID NO: 1591 - DNA, 33 bp, homo sapiens
caaagcacctaaggcartaagcaatttgtctat

SEQ ID NO: 1592 - DNA, 33 bp, homo sapiens
agggacaatacccaaargaccaagatcatcttt

SEQ ID NO: 1593 - DNA, 33 bp, homo sapiens
tttattaggtcagtgayagggtcaagtaggcaa

SEQ ID NO: 1594 - DNA, 33 bp, homo sapiens
atcttcctagtccaaasagatgtggacattccc

SEQ ID NO: 1595 - DNA, 33 bp, homo sapiens
catcgtagcaaaatagycactagtagagcatat

SEQ ID NO: 1596 - DNA, 33 bp, homo sapiens
ttttggtcaaattctgmaatcatatgtaacaaa

SEQ ID NO: 1597 - DNA, 33 bp, homo sapiens
gaagaaattaggtttcraaattgtacctgcatg

SEQ ID NO: 1598 - DNA, 33 bp, homo sapiens
tatatatttctcggaayggcctaaaaaaagtaa

SEQ ID NO: 1599 - DNA, 33 bp, homo sapiens
taataataaacagaaamatttaatcggacttag

SEQ ID NO: 1600 - DNA, 33 bp, homo sapiens
atactttccctgacaawccatgtagattttgct

SEQ ID NO: 1601 - DNA, 33 bp, homo sapiens
cagggccacttgatccrgagacttcagcttgcc

SEQ ID NO: 1602 - DNA, 33 bp, homo sapiens
tgaagtataaagacaarcaaagctaaatacatt

SEQ ID NO: 1603 - DNA, 33 bp, homo sapiens
tcgatgacaaacccaamgagaagaattgcaggg

SEQ ID NO: 1604 - DNA, 33 bp, homo sapiens
ttcttagagctcaatgwcaccattacttcaatg

SEQ ID NO: 1605 - DNA, 33 bp, homo sapiens
ctaacctataagagacracagttaagcaatggt

SEQ ID NO: 1606 - DNA, 33 bp, homo sapiens
aatccagacagaatcawataattccattacctt

SEQ ID NO: 1607 - DNA, 33 bp, homo sapiens
ctatattgaattctcargtaatccatgctgtga

SEQ ID NO: 1608 - DNA, 33 bp, homo sapiens
cagaattaatttgcaaygctgtcatcaacactg

SEQ ID NO: 1609 - DNA, 33 bp, homo sapiens
ttcttggtttcttttayggactccacttctata

SEQ ID NO: 1610 - DNA, 33 bp, homo sapiens
gtgtaaactctattacragtctaatacatggta

SEQ ID NO: 1611 - DNA, 33 bp, homo sapiens
gagacaggaaagcctcygaagcaagaaggtctc

SEQ ID NO: 1612 - DNA, 33 bp, homo sapiens
gactttagtttgcaagyctggatttagagagca

SEQ ID NO: 1613 - DNA, 33 bp, homo sapiens
gcctggatgaagttcargaaattagaagccagt

SEQ ID NO: 1614 - DNA, 33 bp, homo sapiens
tacagtgtctttcgtcyagccaggcttatgatc

SEQ ID NO: 1615 - DNA, 33 bp, homo sapiens
ttttttctgttgaatakatttgcagtcagtttt

SEQ ID NO: 1616 - DNA, 33 bp, homo sapiens
taaagaacacttaaaaraattgcttgagatttc

SEQ ID NO: 1617 - DNA, 33 bp, homo sapiens
aatttatgataaacatkacaatgaagcttcctc

SEQ ID NO: 1618 - DNA, 33 bp, homo sapiens
ataaggttgctttgacygggtcaggaaattgta

SEQ ID NO: 1619 - DNA, 33 bp, homo sapiens
acacacagggcattacrgcctctcattcttgca

SEQ ID NO: 1620 - DNA, 33 bp, homo sapiens
acaaaatagaaattgargcccaaattgtggaat

SEQ ID NO: 1621 - DNA, 33 bp, homo sapiens
acgaagctctgtgccayaaatttgatgctggga

SEQ ID NO: 1622 - DNA, 33 bp, homo sapiens
acaataacagatgatcwccagggatttggatac

SEQ ID NO: 1623 - DNA, 33 bp, homo sapiens
ctttgttccttcttccygcatagttcagaagtg

SEQ ID NO: 1624 - DNA, 33 bp, homo sapiens
ctaggcttgaatgagaraataacgatacctttc

SEQ ID NO: 1625 - DNA, 33 bp, homo sapiens
caggttgagaacttgcygcaactccttggacag

SEQ ID NO: 1626 - DNA, 33 bp, homo sapiens
ctcagaagccataatcrctgctctctgaagcca

SEQ ID NO: 1627 - DNA, 33 bp, homo sapiens
acagaccagtcttggawgataagtcaggaaagc

SEQ ID NO: 1628 - DNA, 33 bp, homo sapiens
actgtgtatttagatcmatctgaacccatctcc

SEQ ID NO: 1629 - DNA, 33 bp, homo sapiens
ccaacttccaaccttarccattatcccctacta

SEQ ID NO: 1630 - DNA, 33 bp, homo sapiens
ttctccacgggctgctractatagtcgtctatg

SEQ ID NO: 1631 - DNA, 33 bp, homo sapiens
aattggaaaatctttgwatgtggaggactacag

SEQ ID NO: 1632 - DNA, 33 bp, homo sapiens
acatctttgtgactggyagtagataaaatcata

SEQ ID NO: 1633 - DNA, 33 bp, homo sapiens
gtggatctcccatgtaygtcacaggaaagagcc

SEQ ID NO: 1634 - DNA, 33 bp, homo sapiens
cagattttccactttcyaactaagtgaacaaat

SEQ ID NO: 1635 - DNA, 33 bp, homo sapiens
tggatgttgtgaaataygagctttcaaaagtgc

SEQ ID NO: 1636 - DNA, 33 bp, homo sapiens
gccattgaggagccctyacaaaaactggaagga

SEQ ID NO: 1637 - DNA, 33 bp, homo sapiens
ccagggaaaggaaataygagtaattgctgtcca

SEQ ID NO: 1638 - DNA, 33 bp, homo sapiens
gtgtttgcaaagaaaargtaaatcctctgctgc

SEQ ID NO: 1639 - DNA, 33 bp, homo sapiens
ctttttgcttgcaagcygagtcgtttcaggagg

SEQ ID NO: 1640 - DNA, 33 bp, homo sapiens
gtaaaagcccaacacamtgagaggagtagagca

SEQ ID NO: 1641 - DNA, 33 bp, homo sapiens
catttttgccttttagycaacctcttttcattt

SEQ ID NO: 1642 - DNA, 33 bp, homo sapiens
gcaaaatgccagggacrgtaatggttccacatc

SEQ ID NO: 1643 - DNA, 33 bp, homo sapiens
atccaatccaggataaytgactgcactgagttg

SEQ ID NO: 1644 - DNA, 33 bp, homo sapiens
ggcccatattacctggragactctgcgttatag

SEQ ID NO: 1645 - DNA, 33 bp, homo sapiens
ctcttagaccaggagtwaatttcagaacaccag

SEQ ID NO: 1646 - DNA, 33 bp, homo sapiens
cctgaataaaattgtcraaatctgtgcctcatt

SEQ ID NO: 1647 - DNA, 33 bp, homo sapiens
aagatacctccaacacycgtttttctcctcact

SEQ ID NO: 1648 - DNA, 33 bp, homo sapiens
tcacatatttaaggtcyacttgactcaaggagg

SEQ ID NO: 1649 - DNA, 33 bp, homo sapiens
ccagatacttacagacmcactgaaaacaagaag

SEQ ID NO: 1650 - DNA, 33 bp, homo sapiens
catatctgtgatatccracaccactaagttcaa

SEQ ID NO: 1651 - DNA, 33 bp, homo sapiens
aactgtctgaggtaaamgtttctaggtgacttg

SEQ ID NO: 1652 - DNA, 33 bp, homo sapiens
cttgcttcagtagtaasaagagctccgtggggg

SEQ ID NO: 1653 - DNA, 33 bp, homo sapiens
ttccttgcagtgtcagkctctcttcattcattt

SEQ ID NO: 1654 - DNA, 33 bp, homo sapiens
ctcccacgtccttgacmgagcagattttaaatc

SEQ ID NO: 1655 - DNA, 33 bp, homo sapiens
ttcatgagaccttactsagaatcccgtggtgaa

SEQ ID NO: 1656 - DNA, 33 bp, homo sapiens
ctgggaagaagcaatcygatctttatcctttat

SEQ ID NO: 1657 - DNA, 33 bp, homo sapiens
agtctcagaacctaaaygtaaatgcaaagcaga

SEQ ID NO: 1658 - DNA, 33 bp, homo sapiens
gtaaaatacaaaatcaygcagcttggatgtcct

SEQ ID NO: 1659 - DNA, 33 bp, homo sapiens
ctaggccatgcatggtraagagtgtgcactttc

SEQ ID NO: 1660 - DNA, 33 bp, homo sapiens
tttcaagatgattgatmaccttaggtcctggag

SEQ ID NO: 1661 - DNA, 33 bp, homo sapiens
gaataggaggaagagargacatagcaaataaac

SEQ ID NO: 1662 - DNA, 33 bp, homo sapiens
agactttatcctcttgyaattgtaacataagac

SEQ ID NO: 1663 - DNA, 33 bp, homo sapiens
ggggccataagaagcaracctcctaaatctcag

SEQ ID NO: 1664 - DNA, 33 bp, homo sapiens
gggtataaacacagaamatctgaattatttatg

SEQ ID NO: 1665 - DNA, 33 bp, homo sapiens
caccttcgtatacagayaatgaaccaggcctgg

SEQ ID NO: 1666 - DNA, 33 bp, homo sapiens
tatcattagactaatcraagaaccaattttatg

SEQ ID NO: 1667 - DNA, 33 bp, homo sapiens
gcagcaagaagctaccrcacatttgtggctccc

SEQ ID NO: 1668 - DNA, 33 bp, homo sapiens
aattggaatctgacaamcaaccaatgccaacct

SEQ ID NO: 1669 - DNA, 33 bp, homo sapiens
atctcacaaggtcataracatggggatgactgt

SEQ ID NO: 1670 - DNA, 33 bp, homo sapiens
taatctgtgtgagaaastcagggataccaaata

SEQ ID NO: 1671 - DNA, 33 bp, homo sapiens
gaaaaacatttataccyatggacgcttaatttc

SEQ ID NO: 1672 - DNA, 33 bp, homo sapiens
ctggaataatctttgcragttcagatttgatcc

SEQ ID NO: 1673 - DNA, 33 bp, homo sapiens
cctgcctcgacttggcrgatgatgtaaggaaag

SEQ ID NO: 1674 - DNA, 33 bp, homo sapiens
gagagaagtgaaggaartcaccaagagtacggt

SEQ ID NO: 1675 - DNA, 33 bp, homo sapiens
gtgtccatcactgttgwaccatcattttaacct

SEQ ID NO: 1676 - DNA, 33 bp, homo sapiens
actagatcctcatctarcataacaggaagtcag

SEQ ID NO: 1677 - DNA, 33 bp, homo sapiens
aaaccaatcgtgatgcscagctctttgggttat

SEQ ID NO: 1678 - DNA, 33 bp, homo sapiens
acagcattgggaacagraggataatggtcctct

SEQ ID NO: 1679 - DNA, 33 bp, homo sapiens
acacagaaacaaatacrgaggtacaagcagatt

SEQ ID NO: 1680 - DNA, 33 bp, homo sapiens
ttcctttcttacctctyaagtggccttggccat

SEQ ID NO: 1681 - DNA, 33 bp, homo sapiens
tataattttatcccacygtatcctgggcattag

SEQ ID NO: 1682 - DNA, 33 bp, homo sapiens
ctgagtgctgcgccaartcggttgcctccttcc

SEQ ID NO: 1683 - DNA, 33 bp, homo sapiens
gctcactcagcctaaaygcactgctgcgcaaaa

SEQ ID NO: 1684 - DNA, 33 bp, homo sapiens
agcccaggctgcgcaaygaaaacaccagcacct

SEQ ID NO: 1685 - DNA, 33 bp, homo sapiens
attcactggtcttcaastgctttttttcctgaa

SEQ ID NO: 1686 - DNA, 33 bp, homo sapiens
tttgacattttcagtgyaatttggacttgaagt

SEQ ID NO: 1687 - DNA, 33 bp, homo sapiens
gaagtcagatggggaaracacgatgctttgcct

SEQ ID NO: 1688 - DNA, 33 bp, homo sapiens
ttgctttttgttaggayagaatggcgacttcca

SEQ ID NO: 1689 - DNA, 33 bp, homo sapiens
aaccagctaacaacgcratgacagaagaaaatc

SEQ ID NO: 1690 - DNA, 33 bp, homo sapiens
cttctgcaagggatcartagaacccaggctgtt

SEQ ID NO: 1691 - DNA, 33 bp, homo sapiens
catctgaaccacaaagsctggattggatttggc

SEQ ID NO: 1692 - DNA, 33 bp, homo sapiens
atctaaataatgtctgyaatgcactagtatgaa

SEQ ID NO: 1693 - DNA, 33 bp, homo sapiens
aggggtttttatcaaasaaccacatcatatcgc

SEQ ID NO: 1694 - DNA, 33 bp, homo sapiens
taggtagccacggtgakcactgagttgcctttt

SEQ ID NO: 1695 - DNA, 33 bp, homo sapiens
taatattgttttcaacygtggagagaccccaat

SEQ ID NO: 1696 - DNA, 33 bp, homo sapiens
taactaaattagctaargagatcaaagaaggag

SEQ ID NO: 1697 - DNA, 33 bp, homo sapiens
tatccatctcagtatcyaagcactcggcgtagg

SEQ ID NO: 1698 - DNA, 33 bp, homo sapiens
gcaaaagataaaaaacygtaccaggcaggagaa

SEQ ID NO: 1699 - DNA, 33 bp, homo sapiens
ccctgttgttatttccrcttcagagggtcaggg

SEQ ID NO: 1700 - DNA, 33 bp, homo sapiens
cctacttgcttcctccractgtctaccttgtca

SEQ ID NO: 1701 - DNA, 33 bp, homo sapiens
ttgggtcacactgtaarttaaaatggagctgaa

SEQ ID NO: 1702 - DNA, 33 bp, homo sapiens
ttagggaaagtgtggtsaaaatggctctattat

SEQ ID NO: 1703 - DNA, 33 bp, homo sapiens
tctttgacttacctaamcaaaatctataagcaa

SEQ ID NO: 1704 - DNA, 33 bp, homo sapiens
atgtataatgaattccyataggccagctgggta

SEQ ID NO: 1705 - DNA, 33 bp, homo sapiens
ggacttttctctgccgwaagtgactgaaatcat

SEQ ID NO: 1706 - DNA, 33 bp, homo sapiens
gctacaatagaagtcaragcatcaccagaatgg

SEQ ID NO: 1707 - DNA, 33 bp, homo sapiens
atattcccctgtgctayagttttttgaatttgc

SEQ ID NO: 1708 - DNA, 33 bp, homo sapiens
tgttaatctacatctamgaagctcagtgaagtg

SEQ ID NO: 1709 - DNA, 33 bp, homo sapiens
actgggtcaaccaaagycatttatctcctaaga

SEQ ID NO: 1710 - DNA, 33 bp, homo sapiens
tatcattctgattgtaygtgatttacttctgaa

SEQ ID NO: 1711 - DNA, 33 bp, homo sapiens
caattctataccccctragaatccaaaaatttt

SEQ ID NO: 1712 - DNA, 33 bp, homo sapiens
aacatattattgaaaaygggagtgaacaattta

SEQ ID NO: 1713 - DNA, 33 bp, homo sapiens
cttattagctcttcaargatacagtctccagta

SEQ ID NO: 1714 - DNA, 33 bp, homo sapiens
tttttaaaagatgagtractacctgtaaaatac

SEQ ID NO: 1715 - DNA, 33 bp, homo sapiens
cgtagagggatgtagaygtataagtgctgcctt

SEQ ID NO: 1716 - DNA, 33 bp, homo sapiens
tttctttgcaccatgamcattggtccacaacta

SEQ ID NO: 1717 - DNA, 33 bp, homo sapiens
tatcttcatgcttaaartatgtttccatagata

SEQ ID NO: 1718 - DNA, 33 bp, homo sapiens
ttagtgtgtatttacarcgtctgtttgatttgt

SEQ ID NO: 1719 - DNA, 33 bp, homo sapiens
tataagtcaatgagaaragttacaactgggaga

SEQ ID NO: 1720 - DNA, 33 bp, homo sapiens
gaaatacatgaaaatayatgagttgcctgccct

SEQ ID NO: 1721 - DNA, 33 bp, homo sapiens
tttttaaagcgaagaargtgctgtaaaacatct

SEQ ID NO: 1722 - DNA, 33 bp, homo sapiens
actctgtaaagtatcawtgacctttcttgtaat

SEQ ID NO: 1723 - DNA, 33 bp, homo sapiens
ttttgatacagaaaatsatatgtaaaaaagaga

SEQ ID NO: 1724 - DNA, 33 bp, homo sapiens
caatccaggacataaaygttatgtggcatctag

SEQ ID NO: 1725 - DNA, 33 bp, homo sapiens
ctggacaaggtctaggmcagagattttcaacca

SEQ ID NO: 1726 - DNA, 33 bp, homo sapiens
tcatgtgcagggcttgmattggaatgtgagttt

SEQ ID NO: 1727 - DNA, 33 bp, homo sapiens
tgaaattttgtgtaagmcattccaccaaccatc

SEQ ID NO: 1728 - DNA, 33 bp, homo sapiens
agatgagaagaatgagratcaaatgggcctggg

SEQ ID NO: 1729 - DNA, 33 bp, homo sapiens
ctcattacggacaacartgggattcattatgca

SEQ ID NO: 1730 - DNA, 33 bp, homo sapiens
aataaacctgacgtaawtgtttatggtataggg

SEQ ID NO: 1731 - DNA, 33 bp, homo sapiens
ttaggagacctttggaygtaccataactgctaa

SEQ ID NO: 1732 - DNA, 33 bp, homo sapiens
attaatttcactggatsaatttaagaactaaca

SEQ ID NO: 1733 - DNA, 33 bp, homo sapiens
agggaatgtaggctacyagtttataacctctgt

SEQ ID NO: 1734 - DNA, 33 bp, homo sapiens
cctggcctttaataaasagagctatcatgcaaa

SEQ ID NO: 1735 - DNA, 33 bp, homo sapiens
tatttaaaaatcaaccsataagtctttcacatc

SEQ ID NO: 1736 - DNA, 33 bp, homo sapiens
aatattacgggtttgaygtggttagatatactg

SEQ ID NO: 1737 - DNA, 33 bp, homo sapiens
tgattacaaggtatcckgcaagaaatgtaactc

SEQ ID NO: 1738 - DNA, 33 bp, homo sapiens
cttcacctaggggaaayctggagaaactacaca

SEQ ID NO: 1739 - DNA, 33 bp, homo sapiens
agtgcaagatcaagtgyatcctcttcctaaatt

SEQ ID NO: 1740 - DNA, 33 bp, homo sapiens
tttgactctgccacaayattaggacaagtcaat

SEQ ID NO: 1741 - DNA, 33 bp, homo sapiens
ttaggagttatcaaccyacattcaggggacctg

SEQ ID NO: 1742 - DNA, 33 bp, homo sapiens
gttactagttgatacartaagtcaatacttgtg

SEQ ID NO: 1743 - DNA, 33 bp, homo sapiens
atcatgtatggggtaaygtagcctagaccattt

SEQ ID NO: 1744 - DNA, 33 bp, homo sapiens
cctcagctcctctaatkatatgttacagaagct

SEQ ID NO: 1745 - DNA, 33 bp, homo sapiens
ttctttccctatgtagycccccaagaagctggg

SEQ ID NO: 1746 - DNA, 33 bp, homo sapiens
atgttttctgtgactaraagcaccataaactgg

SEQ ID NO: 1747 - DNA, 33 bp, homo sapiens
tattgtaaatctatcartcagaatctccaacat

SEQ ID NO: 1748 - DNA, 33 bp, homo sapiens
agaatcacttgatggawgaaacaacatcgttca

SEQ ID NO: 1749 - DNA, 33 bp, homo sapiens
cctgaccagagcattayatttcatgcattccca

SEQ ID NO: 1750 - DNA, 33 bp, homo sapiens
gcctgaattaggtcaastgcccgccccgatcta

SEQ ID NO: 1751 - DNA, 33 bp, homo sapiens
gttctgatgtccaaggkcagaagaagaaggatg

SEQ ID NO: 1752 - DNA, 33 bp, homo sapiens
ccttgtgaagatgaccyattttccactccaaag

SEQ ID NO: 1753 - DNA, 33 bp, homo sapiens
caccctggttcatcacrgaagcctgcctgcgat

SEQ ID NO: 1754 - DNA, 33 bp, homo sapiens
tgaaaacacaactttcmccttagaatatttgca

SEQ ID NO: 1755 - DNA, 33 bp, homo sapiens
tgaaagtgggcttcaayacatactgcaaagcaa

SEQ ID NO: 1756 - DNA, 33 bp, homo sapiens
atgtcacccattttggrcacttactcaaggaat

SEQ ID NO: 1757 - DNA, 33 bp, homo sapiens
acacgaagaggaactamcttgtttgcaccccag

SEQ ID NO: 1758 - DNA, 33 bp, homo sapiens
acagaaaagtctgatgyaagcaggaacaaacat

SEQ ID NO: 1759 - DNA, 33 bp, homo sapiens
caagtgaccagtagtaycagccctgcaagatgc

SEQ ID NO: 1760 - DNA, 33 bp, homo sapiens
ccatttacctgcattaygtcaattaaccgctta

SEQ ID NO: 1761 - DNA, 33 bp, homo sapiens
tcttatactctaagcartctgtacaattcctgt

SEQ ID NO: 1762 - DNA, 33 bp, homo sapiens
tctagatttgaaatgarggcatgaaacttctcc

SEQ ID NO: 1763 - DNA, 33 bp, homo sapiens
aataaacttagtgatayatttgcctataggtaa

SEQ ID NO: 1764 - DNA, 33 bp, homo sapiens
ataaaaccagacagaaygtccatgcccgtaagc

SEQ ID NO: 1765 - DNA, 33 bp, homo sapiens
caccccaaagtattggsatggacaattcactcg

SEQ ID NO: 1766 - DNA, 33 bp, homo sapiens
gttagtccagcctcagraagttgttatgttccc

SEQ ID NO: 1767 - DNA, 33 bp, homo sapiens
ctctagctcttttccarggaaaatctatgcaga

SEQ ID NO: 1768 - DNA, 33 bp, homo sapiens
gcattcatggcccccawaatacagtggcggtgg

SEQ ID NO: 1769 - DNA, 33 bp, homo sapiens
tgatcacttactatacrcttactatacaaactc

SEQ ID NO: 1770 - DNA, 33 bp, homo sapiens
actgtgtgaacttgcaygggagcacaaaagccc

SEQ ID NO: 1771 - DNA, 33 bp, homo sapiens
ctcaggtaacataacasagtcttctcagtgtag

SEQ ID NO: 1772 - DNA, 33 bp, homo sapiens
aacattattgattaacwccatgatgggtacaat

SEQ ID NO: 1773 - DNA, 33 bp, homo sapiens
cagctttagatttatgrcagaacgggagtgtgt

SEQ ID NO: 1774 - DNA, 33 bp, homo sapiens
aactatccaggctgaargagaaatactgtggac

SEQ ID NO: 1775 - DNA, 33 bp, homo sapiens
gggctgaaaatgaagcragaaaacacatgggga

SEQ ID NO: 1776 - DNA, 33 bp, homo sapiens
agttgcctaccccctcrctatcaaatcttgact

SEQ ID NO: 1777 - DNA, 33 bp, homo sapiens
gcttctgcagcttgcgkagtgggataatttctc

SEQ ID NO: 1778 - DNA, 33 bp, homo sapiens
atgaataaaaagtaatyatgctcagtataggct

SEQ ID NO: 1779 - DNA, 33 bp, homo sapiens
tgcttaacccaacccarctaaggacataaatat

SEQ ID NO: 1780 - DNA, 33 bp, homo sapiens
ctacagtgatcagaacracccatagaaaaggat

SEQ ID NO: 1781 - DNA, 33 bp, homo sapiens
atctatgtagcacaacraaaaagttaattggaa

SEQ ID NO: 1782 - DNA, 33 bp, homo sapiens
agagcattatgacctasgaactgcaggccaacc

SEQ ID NO: 1783 - DNA, 33 bp, homo sapiens
gatgtgtttgtcaccartggacactcactaaag

SEQ ID NO: 1784 - DNA, 33 bp, homo sapiens
tgtgtggtttgatagcrcatttccttttgaagc

SEQ ID NO: 1785 - DNA, 33 bp, homo sapiens
tgaccatgggcccaagragatctggctacctcc

SEQ ID NO: 1786 - DNA, 33 bp, homo sapiens
gtgatgagctgcttccyccacgatttcactcaa

SEQ ID NO: 1787 - DNA, 33 bp, homo sapiens
cttgcaccacagcagargaaacttacaccaacc

SEQ ID NO: 1788 - DNA, 33 bp, homo sapiens
gaacaaatagtcactcyctgtgttttcaaatgt

SEQ ID NO: 1789 - DNA, 33 bp, homo sapiens
ggtttaggggacttgasaattgacagagtaaag

SEQ ID NO: 1790 - DNA, 33 bp, homo sapiens
aacaaactgggaagacratttcatcaaatatgg

SEQ ID NO: 1791 - DNA, 33 bp, homo sapiens
aaatgatatgagtaaamcagggtgagattttct

SEQ ID NO: 1792 - DNA, 33 bp, homo sapiens
aacccaaaagttaggawtagtatgacctcacaa

SEQ ID NO: 1793 - DNA, 33 bp, homo sapiens
tttgagcagctgtgacrgaaaccatataaccag

SEQ ID NO: 1794 - DNA, 33 bp, homo sapiens
gtgtgtataagattcayacttcaggattctctg

SEQ ID NO: 1795 - DNA, 33 bp, homo sapiens
gaacccgcaacggcgaytccctggacatgtggc

SEQ ID NO: 1796 - DNA, 33 bp, homo sapiens
agtgacattaggtcaaygtatgtacttgcctgg

SEQ ID NO: 1797 - DNA, 33 bp, homo sapiens
tagttgctattgtaaayggaaaaatcaggaaat

SEQ ID NO: 1798 - DNA, 33 bp, homo sapiens
tgcatactgctttataygagaactagttacaat

SEQ ID NO: 1799 - DNA, 33 bp, homo sapiens
agtgtcagagttcaaaygcaggttctgccactt

SEQ ID NO: 1800 - DNA, 33 bp, homo sapiens
caaaaatccttccgaasagcaccccggctggct

SEQ ID NO: 1801 - DNA, 33 bp, homo sapiens
ccatatttattgaacaygataactgacaattga

SEQ ID NO: 1802 - DNA, 33 bp, homo sapiens
ataccgctatatgagasaaaaagcatcttttca

SEQ ID NO: 1803 - DNA, 33 bp, homo sapiens
ttcaagcgtgtctcccrggagcaatgtgaggag

SEQ ID NO: 1804 - DNA, 33 bp, homo sapiens
ccatgaagtacttgaargattctccagagaaga

SEQ ID NO: 1805 - DNA, 33 bp, homo sapiens
tgttttattcatcatcrcagcattgcctatatt

SEQ ID NO: 1806 - DNA, 33 bp, homo sapiens
ggagggctctggtgacygctttttagttgaagg

SEQ ID NO: 1807 - DNA, 33 bp, homo sapiens
agacttctcactaaaaytgagctgtgtaggcat

SEQ ID NO: 1808 - DNA, 33 bp, homo sapiens
tcttgttacactcttawctggccaagttcccac

SEQ ID NO: 1809 - DNA, 33 bp, homo sapiens
gtaactcagtaataacmaaacctagacccctgc

SEQ ID NO: 1810 - DNA, 33 bp, homo sapiens
aagcacctggttttacwcgagctgggcctatta

SEQ ID NO: 1811 - DNA, 33 bp, homo sapiens
ggccctacctagttctwaatgagttcttcaatc

SEQ ID NO: 1812 - DNA, 33 bp, homo sapiens
aatcacagaaggccatragaggatttcctaaac

SEQ ID NO: 1813 - DNA, 33 bp, homo sapiens
ttggtcttggggttacmaacacgtagcaagtag

SEQ ID NO: 1814 - DNA, 33 bp, homo sapiens
actaaaggtgtaaagcmgaaatctcaagttcaa

SEQ ID NO: 1815 - DNA, 33 bp, homo sapiens
actaaatggagagaaayggatggagaaagatgc

SEQ ID NO: 1816 - DNA, 33 bp, homo sapiens
cccatcccagattcccmatggcgaagattgaga

SEQ ID NO: 1817 - DNA, 33 bp, homo sapiens
cactcacagagttcagmcctaggtacaaagttt

SEQ ID NO: 1818 - DNA, 33 bp, homo sapiens
tggccccttgtcttcaygtctcttattaccaca

SEQ ID NO: 1819 - DNA, 33 bp, homo sapiens
atccctgggaaaatgaygatacagggaaactgc

SEQ ID NO: 1820 - DNA, 33 bp, homo sapiens
gaatggcaagtgaaagkctataggttatactgt

SEQ ID NO: 1821 - DNA, 33 bp, homo sapiens
gcaccctgtgtagtgarcagcaaacaagctgat

SEQ ID NO: 1822 - DNA, 33 bp, homo sapiens
atcctgaggatggatasgctcatgacaaagaga

SEQ ID NO: 1823 - DNA, 33 bp, homo sapiens
taaaaacaaggcaaaaratgattgaaaggatta

SEQ ID NO: 1824 - DNA, 33 bp, homo sapiens
aaaccattaccatcagycagtctgtccacccac

SEQ ID NO: 1825 - DNA, 33 bp, homo sapiens
ggtattaggctgagatractccagcgtgttggg

SEQ ID NO: 1826 - DNA, 33 bp, homo sapiens
ccgcaggacacacaackcatgtcagttctaggg

SEQ ID NO: 1827 - DNA, 33 bp, homo sapiens
agggtagtcagggagayggttaattccatttga

SEQ ID NO: 1828 - DNA, 33 bp, homo sapiens
acgaagacgaagacgaygaagaagaataagagg

SEQ ID NO: 1829 - DNA, 33 bp, homo sapiens
ggcttgctggatgcaascttaacctcaatgtga

SEQ ID NO: 1830 - DNA, 33 bp, homo sapiens
tgatgattcaagatgayaaggtctggacaaatg

SEQ ID NO: 1831 - DNA, 33 bp, homo sapiens
gctgttgggggtaacaraaaacagaagacataa

SEQ ID NO: 1832 - DNA, 33 bp, homo sapiens
cttcagtaaattcatamatggctacatcttgac

SEQ ID NO: 1833 - DNA, 33 bp, homo sapiens
gtcaagagaagtcaccrgaaagaaaattagata

SEQ ID NO: 1834 - DNA, 33 bp, homo sapiens
tgagatttaaaacccaratatctcagaaacatt

SEQ ID NO: 1835 - DNA, 33 bp, homo sapiens
tctgtatgagtacataygatctcctattctttg

SEQ ID NO: 1836 - DNA, 33 bp, homo sapiens
gactgaacttgatctasattcttaccctttttc

SEQ ID NO: 1837 - DNA, 33 bp, homo sapiens
taactcccatatagacractccagcacttttct

SEQ ID NO: 1838 - DNA, 33 bp, homo sapiens
tgagggagacaggtaaycaaatcctaagtaaag

SEQ ID NO: 1839 - DNA, 33 bp, homo sapiens
aagactacaaatggcamacaggtgtatgaatag

SEQ ID NO: 1840 - DNA, 33 bp, homo sapiens
agagtccaggtaacaawtacataccgaacagtt

SEQ ID NO: 1841 - DNA, 33 bp, homo sapiens
gcaaaaatagtacatayaccgtctgatgtgggt

SEQ ID NO: 1842 - DNA, 33 bp, homo sapiens
atgtacaatgattacamagatgtaagcttcaca

SEQ ID NO: 1843 - DNA, 33 bp, homo sapiens
catctgactgcagtaaytcaggcaatattataa

SEQ ID NO: 1844 - DNA, 33 bp, homo sapiens
ctccactgacagataayggaagttgaccatttt

SEQ ID NO: 1845 - DNA, 33 bp, homo sapiens
tccaaactccagtcaastctagaaattattttt

SEQ ID NO: 1846 - DNA, 33 bp, homo sapiens
gctttcaagtcctgacrctcccagaatgccttg

SEQ ID NO: 1847 - DNA, 33 bp, homo sapiens
taacctttacataaacrgtgtcatgtattgctc

SEQ ID NO: 1848 - DNA, 33 bp, homo sapiens
caataggtaaaattaaytgatgggtggatagag

SEQ ID NO: 1849 - DNA, 33 bp, homo sapiens
gatggtttgttaggcartaaataactggaacat

SEQ ID NO: 1850 - DNA, 33 bp, homo sapiens
aggaagcatagtacacraatcactgtgcttgct

SEQ ID NO: 1851 - DNA, 33 bp, homo sapiens
ttcgaaggaagaagtarctaattgaatctgaag

SEQ ID NO: 1852 - DNA, 33 bp, homo sapiens
tgggactgattcatgcrcttacccactagactt

SEQ ID NO: 1853 - DNA, 33 bp, homo sapiens
gaaaattgacatttccrgagaattcattcattt

SEQ ID NO: 1854 - DNA, 33 bp, homo sapiens
gaaatagctacatgacygaggaggagcttgatg

SEQ ID NO: 1855 - DNA, 33 bp, homo sapiens
actaaagcaaaagtcartaaacaaaggattgta

SEQ ID NO: 1856 - DNA, 33 bp, homo sapiens
ctaagacaaaacaaaaygcagtaccactgacgt

SEQ ID NO: 1857 - DNA, 33 bp, homo sapiens
caggtagtacaccacayagaaccagactctcag

SEQ ID NO: 1858 - DNA, 33 bp, homo sapiens
acttctaactcctggawgaatcgctcaagctca

SEQ ID NO: 1859 - DNA, 33 bp, homo sapiens
ttctgccatcctcaccyggtcagcgacagagct

SEQ ID NO: 1860 - DNA, 33 bp, homo sapiens
gggggccaaaagtggargacaagattagggttt

SEQ ID NO: 1861 - DNA, 33 bp, homo sapiens
cacaatttctctgaatyaatcctggttctatga

SEQ ID NO: 1862 - DNA, 33 bp, homo sapiens
caagcaccttctgaagrcctcaggggagagtct

SEQ ID NO: 1863 - DNA, 33 bp, homo sapiens
ctgctttcctctaacarggaccattgtgcccgc

SEQ ID NO: 1864 - DNA, 33 bp, homo sapiens
cccctcaagaggaaaartggggggtctcactca

SEQ ID NO: 1865 - DNA, 33 bp, homo sapiens
ctcaccatacctgaatsatgctaaaacctgcat

SEQ ID NO: 1866 - DNA, 33 bp, homo sapiens
agcaggggactctgggyaagtaggacaaccaac

SEQ ID NO: 1867 - DNA, 33 bp, homo sapiens
cacctccttctgcaaamcgccctgttacaggtg

SEQ ID NO: 1868 - DNA, 33 bp, homo sapiens
gtagtcccaactcatargaaagcatcagaagag

SEQ ID NO: 1869 - DNA, 33 bp, homo sapiens
cttaatatttggtaaakgcaagatacattgtag

SEQ ID NO: 1870 - DNA, 33 bp, homo sapiens
tgctgatggatcatgarggatggtaagcagaaa

SEQ ID NO: 1871 - DNA, 33 bp, homo sapiens
ggatgaacaaattgcamaacaagaggctggtcg

SEQ ID NO: 1872 - DNA, 33 bp, homo sapiens
ccaattgattgactacygatttgactttgcatt

SEQ ID NO: 1873 - DNA, 33 bp, homo sapiens
gaagaagacagttccaytcctgccctcaagtgt

SEQ ID NO: 1874 - DNA, 33 bp, homo sapiens
atgaagatgttatagastccatattgcatacac

SEQ ID NO: 1875 - DNA, 33 bp, homo sapiens
tgtaaactgattcagcycttaggaaagcagttt

SEQ ID NO: 1876 - DNA, 33 bp, homo sapiens
tatgcattgctgagaartattatagtctcaata

SEQ ID NO: 1877 - DNA, 33 bp, homo sapiens
cagatcacgtagaggaygaaccttctatttttt

SEQ ID NO: 1878 - DNA, 33 bp, homo sapiens
atcatcaacatagaaarttaacaagatattcag

SEQ ID NO: 1879 - DNA, 33 bp, homo sapiens
aatttaggctctgtccrcacagattaggagtcc

SEQ ID NO: 1880 - DNA, 33 bp, homo sapiens
acctgctttttctgcascctagtgaaacatcac

SEQ ID NO: 1881 - DNA, 33 bp, homo sapiens
agggagttatcacgaasagattttaatactagt

SEQ ID NO: 1882 - DNA, 33 bp, homo sapiens
actttaaccagcagaaktagaatcaagggtgat

SEQ ID NO: 1883 - DNA, 33 bp, homo sapiens
atgaagacaaattttayggcacatgagagttca

SEQ ID NO: 1884 - DNA, 33 bp, homo sapiens
aataattacacataatsatagagtaataagatg

SEQ ID NO: 1885 - DNA, 33 bp, homo sapiens
attacaaacagtaccayaaaaactgcgtgtcca

SEQ ID NO: 1886 - DNA, 33 bp, homo sapiens
gtatgggtcacaaagarcatcaggtgataacac

SEQ ID NO: 1887 - DNA, 33 bp, homo sapiens
cttaatcagttaaatcraatctatgagaagaaa

SEQ ID NO: 1888 - DNA, 33 bp, homo sapiens
aaatgattacaggttaygaactaagctaatata

SEQ ID NO: 1889 - DNA, 33 bp, homo sapiens
cacacaagatctttcascattatgtctaacaag

SEQ ID NO: 1890 - DNA, 33 bp, homo sapiens
gtcattcaacaatcaamccatctccacatatac

SEQ ID NO: 1891 - DNA, 33 bp, homo sapiens
aaaaaacacggttcackctacacttattctaac

SEQ ID NO: 1892 - DNA, 33 bp, homo sapiens
tgagattgcctaaacarcaacttatatataaaa

SEQ ID NO: 1893 - DNA, 33 bp, homo sapiens
cagcttatttgtgtgamtcaagattttcttaat

SEQ ID NO: 1894 - DNA, 33 bp, homo sapiens
agctagatttcaaaaawtatttggaaagcctgt

SEQ ID NO: 1895 - DNA, 33 bp, homo sapiens
agtgggccaaaaggaawaacaaatcattatcaa

SEQ ID NO: 1896 - DNA, 33 bp, homo sapiens
aaagctctggatataaracactctccaatttgc

SEQ ID NO: 1897 - DNA, 33 bp, homo sapiens
tatatagtgctgtgaayagagcaacaacttgcc

SEQ ID NO: 1898 - DNA, 33 bp, homo sapiens
gtttagagtttttatgsaagttaggaagtgatg

SEQ ID NO: 1899 - DNA, 33 bp, homo sapiens
ggtatggatgaacggcrcaagatgatggatagt

SEQ ID NO: 1900 - DNA, 33 bp, homo sapiens
actgggagaagccacayctgtaggaattacaag

SEQ ID NO: 1901 - DNA, 33 bp, homo sapiens
aatgaattctgacatgraaaatacaagaatatg

SEQ ID NO: 1902 - DNA, 33 bp, homo sapiens
aacagctaataacaaarcactgtggatattaca

SEQ ID NO: 1903 - DNA, 33 bp, homo sapiens
gtgtgatcacatggccragctccgtgcctctct

SEQ ID NO: 1904 - DNA, 33 bp, homo sapiens
tagcatcattacaaggragaaggaacccaggag

SEQ ID NO: 1905 - DNA, 33 bp, homo sapiens
tcacaaatacaaaattsaaagtcttatctggga

SEQ ID NO: 1906 - DNA, 33 bp, homo sapiens
tgtggggtatctctgaraacatgtttgccctgc

SEQ ID NO: 1907 - DNA, 33 bp, homo sapiens
aatttgccaagtgttckagaatttctgtaacag

SEQ ID NO: 1908 - DNA, 33 bp, homo sapiens
atttgtccatctgacayaaattaacctcttgct

SEQ ID NO: 1909 - DNA, 33 bp, homo sapiens
ctccagacatgaccagsaggctctaaggctcat

SEQ ID NO: 1910 - DNA, 33 bp, homo sapiens
aggcaaaggcttagtgratcaggaggagggaag

SEQ ID NO: 1911 - DNA, 33 bp, homo sapiens
gttttggccaatgaaayttaaggtgatgtgtgc

SEQ ID NO: 1912 - DNA, 33 bp, homo sapiens
tgatctgatggggtcckgccagtgagagagcag

SEQ ID NO: 1913 - DNA, 33 bp, homo sapiens
tggccgttcagttttcraattctgtgaaattcc

SEQ ID NO: 1914 - DNA, 33 bp, homo sapiens
cttcactttctcaccarcatttcttactgcttg

SEQ ID NO: 1915 - DNA, 33 bp, homo sapiens
gctcccatcattaataygccaaaaggggtccat

SEQ ID NO: 1916 - DNA, 33 bp, homo sapiens
tcctcacctgtgaagarccagctgaccagcggc

SEQ ID NO: 1917 - DNA, 33 bp, homo sapiens
tcctagcaagagtagasaaaaaggagcaaaagt

SEQ ID NO: 1918 - DNA, 33 bp, homo sapiens
ggaggccagatggataygctgctgagatgaccc

SEQ ID NO: 1919 - DNA, 33 bp, homo sapiens
tcagattcttaattgcscttaccatttcttaac

SEQ ID NO: 1920 - DNA, 33 bp, homo sapiens
aataaggactaattggmattgatttatgagcag

SEQ ID NO: 1921 - DNA, 33 bp, homo sapiens
ctctccagaggcacagraaggcttggtcatcac

SEQ ID NO: 1922 - DNA, 33 bp, homo sapiens
ggaggctggagctctcyataggaggatgtgatg

SEQ ID NO: 1923 - DNA, 33 bp, homo sapiens
atgttttaatgcactaygtcggtaggtaggggg

SEQ ID NO: 1924 - DNA, 33 bp, homo sapiens
agaacagcagaaggtasaggaggaaagagaagt

SEQ ID NO: 1925 - DNA, 33 bp, homo sapiens
tcaggcagttgagataygtgcatgcatcaccgc

SEQ ID NO: 1926 - DNA, 33 bp, homo sapiens
ttatgaacatataaaamggaggccaagtcattc

SEQ ID NO: 1927 - DNA, 33 bp, homo sapiens
gcattgataataaatgycatggtcactatcatg

SEQ ID NO: 1928 - DNA, 33 bp, homo sapiens
tagctcctccatacccygacaccagccagttgc

SEQ ID NO: 1929 - DNA, 33 bp, homo sapiens
tactgttgtaaaccaargttcttgaaataatca

SEQ ID NO: 1930 - DNA, 33 bp, homo sapiens
taaactctaaaaaaaaycctggcgagaagtcta

SEQ ID NO: 1931 - DNA, 33 bp, homo sapiens
ctaaccctgatgctctractttccttggatagc

SEQ ID NO: 1932 - DNA, 33 bp, homo sapiens
gaatggaagaggataasaatcatgtcttcaaaa

SEQ ID NO: 1933 - DNA, 33 bp, homo sapiens
ggttattggacactcarattgatacttgccttt

SEQ ID NO: 1934 - DNA, 33 bp, homo sapiens
aaatgagaaattaaacyagtgataaccaacttt

SEQ ID NO: 1935 - DNA, 33 bp, homo sapiens
gagtgctgaggactcastatagcatctctttca

SEQ ID NO: 1936 - DNA, 33 bp, homo sapiens
tttgggctctgtgcagyatccctatggtaagag

SEQ ID NO: 1937 - DNA, 33 bp, homo sapiens
cgtttgggtatggagaratggagactactatta

SEQ ID NO: 1938 - DNA, 33 bp, homo sapiens
tgtgtccaaaggcagastccattttgtctctta

SEQ ID NO: 1939 - DNA, 33 bp, homo sapiens
gaacagacctgcctcasattaaagaagaaaaga

SEQ ID NO: 1940 - DNA, 33 bp, homo sapiens
tgagaccatcatccaaytacagagtgcctgcca

SEQ ID NO: 1941 - DNA, 33 bp, homo sapiens
agtctgaaacagattasaaattcagtcaaacgg

SEQ ID NO: 1942 - DNA, 33 bp, homo sapiens
agtccaaacaccaggartagcaaaagatgggct

SEQ ID NO: 1943 - DNA, 33 bp, homo sapiens
cattgagttctgaaatragcagactaaattttt

SEQ ID NO: 1944 - DNA, 33 bp, homo sapiens
ggctccgataggcccayggcagatggaagaaag

SEQ ID NO: 1945 - DNA, 33 bp, homo sapiens
ctctgagatgttaaggkaaaaatcccagccctc

SEQ ID NO: 1946 - DNA, 33 bp, homo sapiens
ttgtgcgatgcttccasgcagttctgagatata

SEQ ID NO: 1947 - DNA, 33 bp, homo sapiens
ctagagggcaaagtaasgaggattctgaacata

SEQ ID NO: 1948 - DNA, 33 bp, homo sapiens
gatactactacccaaascttctgtgaatttttt

SEQ ID NO: 1949 - DNA, 33 bp, homo sapiens
gcacacacatagcatayaactttctggggtgtg

SEQ ID NO: 1950 - DNA, 33 bp, homo sapiens
gcaacagcagaagtgawgactggcagcacatga

SEQ ID NO: 1951 - DNA, 33 bp, homo sapiens
gaggccagttaggagtyaaaatctacaatagga

SEQ ID NO: 1952 - DNA, 33 bp, homo sapiens
ggttgcaggggccacaracataagtgcctccag

SEQ ID NO: 1953 - DNA, 33 bp, homo sapiens
tatgtctctttataccygccatctgctgggcac

SEQ ID NO: 1954 - DNA, 33 bp, homo sapiens
cacagggaactttcaaygcaacatttcaatgca

SEQ ID NO: 1955 - DNA, 33 bp, homo sapiens
tgtatggctttcattayagttagcaattattag

SEQ ID NO: 1956 - DNA, 33 bp, homo sapiens
ttcctctttttcttacyatgatacatatcagat

SEQ ID NO: 1957 - DNA, 33 bp, homo sapiens
tcatgtgcaagagccargcgtatagaagagtgc

SEQ ID NO: 1958 - DNA, 33 bp, homo sapiens
gactctcactatctacyatcttctccacatcct

SEQ ID NO: 1959 - DNA, 33 bp, homo sapiens
taagtacaattgtcaayccattatagtttatag

SEQ ID NO: 1960 - DNA, 33 bp, homo sapiens
gatatgttcaactgagrccagatcattcctgga

SEQ ID NO: 1961 - DNA, 33 bp, homo sapiens
acataagaaccaaacastgggacagataaaatg

SEQ ID NO: 1962 - DNA, 33 bp, homo sapiens
tgttcatttatgtgtaygtataggttaaggaag

SEQ ID NO: 1963 - DNA, 33 bp, homo sapiens
atacataggaccagaartagtgtctgttcccac

SEQ ID NO: 1964 - DNA, 33 bp, homo sapiens
atggtcacacaaaattkaatgtcattcaagctc

SEQ ID NO: 1965 - DNA, 33 bp, homo sapiens
ttatggttctttttgaygggagcctccaattgc

SEQ ID NO: 1966 - DNA, 33 bp, homo sapiens
aattatcacaaactaawtggattagacaacaga

SEQ ID NO: 1967 - DNA, 33 bp, homo sapiens
caaccagttcataagasagtaatctaagaggaa

SEQ ID NO: 1968 - DNA, 33 bp, homo sapiens
gatactttctgtctcamagtaaaaagtagcatg

SEQ ID NO: 1969 - DNA, 33 bp, homo sapiens
gttaaaagtaaattggrcagaaaaacacaacag

SEQ ID NO: 1970 - DNA, 33 bp, homo sapiens
attatctgcctactcastattgatgcaaaaaaa

SEQ ID NO: 1971 - DNA, 33 bp, homo sapiens
taaagagaaattggtcwataaatgtttgttaaa

SEQ ID NO: 1972 - DNA, 33 bp, homo sapiens
gattgttctgcttgacyaaaatctcctctgtgg

SEQ ID NO: 1973 - DNA, 33 bp, homo sapiens
gagttacacagggttawagtactttcagagttc

SEQ ID NO: 1974 - DNA, 33 bp, homo sapiens
gtcccttattgttcaaytgatgtagccttttcc

SEQ ID NO: 1975 - DNA, 33 bp, homo sapiens
tgaccttaagagacacrgaatttagttgaggaa

SEQ ID NO: 1976 - DNA, 33 bp, homo sapiens
aagacacaaactgcagratactatgataataag

SEQ ID NO: 1977 - DNA, 33 bp, homo sapiens
cagtagaaaagattccraagaccgaagagacta

SEQ ID NO: 1978 - DNA, 33 bp, homo sapiens
gaattaatttctggtayatgcaaccacaaggaa

SEQ ID NO: 1979 - DNA, 33 bp, homo sapiens
tcctcaatgactcacartaaactaaatgcttat

SEQ ID NO: 1980 - DNA, 33 bp, homo sapiens
aacaccactcaataaaygctcaattacatcgta

SEQ ID NO: 1981 - DNA, 33 bp, homo sapiens
aaatacatccaatttakgatcatttatcactaa

SEQ ID NO: 1982 - DNA, 33 bp, homo sapiens
tattacaagtttcctawaacaaggagacacatg

SEQ ID NO: 1983 - DNA, 33 bp, homo sapiens
tgttttaaaaagaccaytaatttggcataattg

SEQ ID NO: 1984 - DNA, 33 bp, homo sapiens
tgattcagttaaaagakatgacatctgcagaaa

SEQ ID NO: 1985 - DNA, 33 bp, homo sapiens
atatcaacccagagaastgcataacattatgat

SEQ ID NO: 1986 - DNA, 33 bp, homo sapiens
aagacagataatctaawatcaaaacttgtgaaa

SEQ ID NO: 1987 - DNA, 33 bp, homo sapiens
tttctttttgcagttayatgaattacaaattaa

SEQ ID NO: 1988 - DNA, 33 bp, homo sapiens
gtgtgactctagactcratttcttgacactagt

SEQ ID NO: 1989 - DNA, 33 bp, homo sapiens
tcctttgagaacccaaytgttatgagtaacaca

SEQ ID NO: 1990 - DNA, 33 bp, homo sapiens
aagtcttcatactcttraaagttttctattgcc

SEQ ID NO: 1991 - DNA, 33 bp, homo sapiens
ctttctggaccagtacrctcagcttttctgttc

SEQ ID NO: 1992 - DNA, 33 bp, homo sapiens
gggttaacctcacagtraaggaatctttcacat

SEQ ID NO: 1993 - DNA, 33 bp, homo sapiens
aacaggtttgaatatcrataatggagtctcttt

SEQ ID NO: 1994 - DNA, 33 bp, homo sapiens
aagtaacagttgcagasatgggaagaaattttt

SEQ ID NO: 1995 - DNA, 33 bp, homo sapiens
ctacaagattttctccrctttatcattcagccc

SEQ ID NO: 1996 - DNA, 33 bp, homo sapiens
agaaatgggagagacaygattccagcaggggaa

SEQ ID NO: 1997 - DNA, 33 bp, homo sapiens
atatcaaaccaggtaawgatgaagactttaaat

SEQ ID NO: 1998 - DNA, 33 bp, homo sapiens
aaccaatatgacttagmagtaccagtagataca

SEQ ID NO: 1999 - DNA, 33 bp, homo sapiens
cgtaagtatagtgaacrattcaaatttatcaaa

SEQ ID NO: 2000 - DNA, 33 bp, homo sapiens
tttgactttaaaaatcyattgcagtagcttaaa

SEQ ID NO: 2001 - DNA, 33 bp, homo sapiens
aaaggctgctgactaakatcagttctatcttta

SEQ ID NO: 2002 - DNA, 33 bp, homo sapiens
tgctgttgggaatttcwaactttttgcattttt

SEQ ID NO: 2003 - DNA, 33 bp, homo sapiens
ttgtgatgtgtctgtakgtaactatgaaaaaaa

SEQ ID NO: 2004 - DNA, 33 bp, homo sapiens
ttgccaggtggactgaygctgatttccaagatt

SEQ ID NO: 2005 - DNA, 33 bp, homo sapiens
taaaacattgtcaaaarttagtagaagtccacc

SEQ ID NO: 2006 - DNA, 33 bp, homo sapiens
cagttttgacacacaayataatctaatctaacc

SEQ ID NO: 2007 - DNA, 33 bp, homo sapiens
acacacacagaagacaraagcgtctgaacatca

SEQ ID NO: 2008 - DNA, 33 bp, homo sapiens
ttaggagccatggcttwaagaacacctcatata

SEQ ID NO: 2009 - DNA, 33 bp, homo sapiens
gtccagtgaagaaatastacttagacccaacag

SEQ ID NO: 2010 - DNA, 33 bp, homo sapiens
aatacatctatgccaaygactagtggttaaatt

SEQ ID NO: 2011 - DNA, 33 bp, homo sapiens
tattttgaattgatacrgtaggaatataatcct

SEQ ID NO: 2012 - DNA, 33 bp, homo sapiens
gatggagagatctagaygctggtgccccgttgt

SEQ ID NO: 2013 - DNA, 33 bp, homo sapiens
gcagtttcagcagtagyaatggtattgaagaga

SEQ ID NO: 2014 - DNA, 33 bp, homo sapiens
gctcagagactggtatracctttgcaagctgaa

SEQ ID NO: 2015 - DNA, 33 bp, homo sapiens
tcctcttggggaagccyggaaggatgtggctct

SEQ ID NO: 2016 - DNA, 33 bp, homo sapiens
aacagacctgagtttamgtaacttgaaggaagt

SEQ ID NO: 2017 - DNA, 33 bp, homo sapiens
ctactcaaaaaactctwaacagctctgcctacc

SEQ ID NO: 2018 - DNA, 33 bp, homo sapiens
tacactttttctaacaytgactttaacttggtg

SEQ ID NO: 2019 - DNA, 33 bp, homo sapiens
agcagactgcaatccartattctttccaggttg

SEQ ID NO: 2020 - DNA, 33 bp, homo sapiens
gttagcaattagggagkagtgaaagaagcaagt

SEQ ID NO: 2021 - DNA, 33 bp, homo sapiens
gtactgaagtagtgaargtagcagtagtagtga

SEQ ID NO: 2022 - DNA, 33 bp, homo sapiens
tgagcacttactatggrcaaagtactgtgtttg

SEQ ID NO: 2023 - DNA, 33 bp, homo sapiens
ttcagagaactgtgaargtcaaacataaaaatg

SEQ ID NO: 2024 - DNA, 33 bp, homo sapiens
tcaatacgtagacataygacaaaggacaaaaat

SEQ ID NO: 2025 - DNA, 33 bp, homo sapiens
tgtgaaatcttctgaaygtaccactaacaccta

SEQ ID NO: 2026 - DNA, 33 bp, homo sapiens
tcaactcaatgttttaygaaactgacttgcaaa

SEQ ID NO: 2027 - DNA, 33 bp, homo sapiens
ttgttcctaaaagtacwccagttacagcgtcct

SEQ ID NO: 2028 - DNA, 33 bp, homo sapiens
acaggtaatggagtaaygtcctggaagtggtag

SEQ ID NO: 2029 - DNA, 33 bp, homo sapiens
gactaagtcatataaartgatttctgtcctcca

SEQ ID NO: 2030 - DNA, 33 bp, homo sapiens
agtgaacaacatttgaycctacttctgctattt

SEQ ID NO: 2031 - DNA, 33 bp, homo sapiens
gtaatgtttgaatattyaatagctccaaaattt

SEQ ID NO: 2032 - DNA, 33 bp, homo sapiens
cacaaaactgacaacaraagagaaatgataaat

SEQ ID NO: 2033 - DNA, 33 bp, homo sapiens
agagagagaagggaaargtaatgctacaatttc

SEQ ID NO: 2034 - DNA, 33 bp, homo sapiens
tgtggaccatactataygtagcaaagctttaga

SEQ ID NO: 2035 - DNA, 33 bp, homo sapiens
tttatgcaaaacaaatsaaagacttaaatgtaa

SEQ ID NO: 2036 - DNA, 33 bp, homo sapiens
atattttattcaggaaycttttatctcttttcc

SEQ ID NO: 2037 - DNA, 33 bp, homo sapiens
tatagtatgtgctcaawgtgtagtactctgtag

SEQ ID NO: 2038 - DNA, 33 bp, homo sapiens
cattccttgttggagayacaaaggtaaatgcat

SEQ ID NO: 2039 - DNA, 33 bp, homo sapiens
gagagaataaaggacawggctaaagttttcttc

SEQ ID NO: 2040 - DNA, 33 bp, homo sapiens
tcttcagtaattttaaygtagctgtgaatctca

SEQ ID NO: 2041 - DNA, 33 bp, homo sapiens
gaaatctaaggcaatayggtaagcttttctaat

SEQ ID NO: 2042 - DNA, 33 bp, homo sapiens
acctggcccacaaaccrcattcttatatttttg

SEQ ID NO: 2043 - DNA, 33 bp, homo sapiens
gttactcattacaaaaktaggttacagtctgtt

SEQ ID NO: 2044 - DNA, 33 bp, homo sapiens
cattggctgccaaaaaygagacaaagatgtggt

SEQ ID NO: 2045 - DNA, 33 bp, homo sapiens
acttttcttcagcccayacttttttacttttat

SEQ ID NO: 2046 - DNA, 33 bp, homo sapiens
atctaataatcttaccraaaaatgtagatggga

SEQ ID NO: 2047 - DNA, 33 bp, homo sapiens
gggctgaatcggagtasagttccacaaaactaa

SEQ ID NO: 2048 - DNA, 33 bp, homo sapiens
gactacaaaccacacaratgtatcctggtaaac

SEQ ID NO: 2049 - DNA, 33 bp, homo sapiens
ctgtaggaaatagataygtatttaaaagacagt

SEQ ID NO: 2050 - DNA, 33 bp, homo sapiens
atattgtgaagaagaaraatgaaatttgtgcat

SEQ ID NO: 2051 - DNA, 33 bp, homo sapiens
tgaatatagaaagagaracgatgtagcttagga

SEQ ID NO: 2052 - DNA, 33 bp, homo sapiens
agatgggtaaaatcgastattttttccatggaa

SEQ ID NO: 2053 - DNA, 33 bp, homo sapiens
tctaggaccactgttaygatttaacttcatgga

SEQ ID NO: 2054 - DNA, 33 bp, homo sapiens
ctgtttttaaaatagcrgatcccagttacttag

SEQ ID NO: 2055 - DNA, 33 bp, homo sapiens
gtgtaaaattcaagcamctttcctcttccccta

SEQ ID NO: 2056 - DNA, 33 bp, homo sapiens
cacacagcgacagtcaraacgattccttcagtg

SEQ ID NO: 2057 - DNA, 33 bp, homo sapiens
gactgctaacctgtgcraaaagtatgaaacgga

SEQ ID NO: 2058 - DNA, 33 bp, homo sapiens
aagatagcaaaaaggawctaacataagaatata

SEQ ID NO: 2059 - DNA, 33 bp, homo sapiens
aacacagacaagcccartggagaaaacagaaaa

SEQ ID NO: 2060 - DNA, 33 bp, homo sapiens
atgtaaaactcattgamtataggccgggcacag

SEQ ID NO: 2061 - DNA, 33 bp, homo sapiens
ctgtaccactctaagcyattatttgtcagttat

SEQ ID NO: 2062 - DNA, 33 bp, homo sapiens
gtccacattaataggaycattgttaggctggta

SEQ ID NO: 2063 - DNA, 33 bp, homo sapiens
tcccttaaataaagtaygcagtggacagtgttt

SEQ ID NO: 2064 - DNA, 33 bp, homo sapiens
gagtttttgagctggarcaggaaattatcttac

SEQ ID NO: 2065 - DNA, 33 bp, homo sapiens
attattcatattctggscatctgacacttcatt

SEQ ID NO: 2066 - DNA, 33 bp, homo sapiens
gtaagtgcaggggcagwaatttggctataatat

SEQ ID NO: 2067 - DNA, 33 bp, homo sapiens
tgtacaatactttatcmatgccatttttatgat

SEQ ID NO: 2068 - DNA, 33 bp, homo sapiens
cccaaatatgtgaagcraaaacttaaaactaaa

SEQ ID NO: 2069 - DNA, 33 bp, homo sapiens
ctgcagtttcctataawcataattggtttagca

SEQ ID NO: 2070 - DNA, 33 bp, homo sapiens
tttgaagttagaatcarcaagctgtgatgaagg

SEQ ID NO: 2071 - DNA, 33 bp, homo sapiens
cgtaagggcaagaaccmatgaaacctgcattat

SEQ ID NO: 2072 - DNA, 33 bp, homo sapiens
ttgtgttcatagttcartcaaaactctgcagtg

SEQ ID NO: 2073 - DNA, 33 bp, homo sapiens
atcaggaagtgaaagakaaattgttgaagaaag

SEQ ID NO: 2074 - DNA, 33 bp, homo sapiens
agagagaagagcaacargcaaagactgcaccct

SEQ ID NO: 2075 - DNA, 33 bp, homo sapiens
catccccatcactggayaattccacttcaacat

SEQ ID NO: 2076 - DNA, 33 bp, homo sapiens
catagtacatgaaaagrcacttggtccactttg

SEQ ID NO: 2077 - DNA, 33 bp, homo sapiens
agaatagtttctgttaygtaaacacagctgata

SEQ ID NO: 2078 - DNA, 33 bp, homo sapiens
tgattggtggaagtgaygtcatgtatggtaaac

SEQ ID NO: 2079 - DNA, 33 bp, homo sapiens
ccctccaagaagaaacrcttcagatgatagaaa

SEQ ID NO: 2080 - DNA, 33 bp, homo sapiens
ggaagctattgtggtcraataaaggtttggagg

SEQ ID NO: 2081 - DNA, 33 bp, homo sapiens
attgactggttattcaytgaacactgttaccat

SEQ ID NO: 2082 - DNA, 33 bp, homo sapiens
agaggcagtttataaaktcaagaaatgtgttgt

SEQ ID NO: 2083 - DNA, 33 bp, homo sapiens
tcaaaaattgtgtaacyggcaaatgttacagtc

SEQ ID NO: 2084 - DNA, 33 bp, homo sapiens
tttttctgtctttaagwagctcacatatctgtg

SEQ ID NO: 2085 - DNA, 33 bp, homo sapiens
gattagtcatttgcaastaaagagtcatgatga

SEQ ID NO: 2086 - DNA, 33 bp, homo sapiens
ctagaagggatgaggamataaactttaaaatgc

SEQ ID NO: 2087 - DNA, 33 bp, homo sapiens
atgtacaagattgagaygtacaaaactgaaggc

SEQ ID NO: 2088 - DNA, 33 bp, homo sapiens
ggaaggaaatgcttcawctgggatgggtaaaga

SEQ ID NO: 2089 - DNA, 33 bp, homo sapiens
aacagatgcctttcaamtacatgagctggtggt

SEQ ID NO: 2090 - DNA, 33 bp, homo sapiens
ttctgccatgtattacmatgtacctgtttttcc

SEQ ID NO: 2091 - DNA, 33 bp, homo sapiens
gaatctatgtgccatakgattttttttttcttt

SEQ ID NO: 2092 - DNA, 33 bp, homo sapiens
ttaattgtaaaactctraaaagcattagggagg

SEQ ID NO: 2093 - DNA, 33 bp, homo sapiens
cttcaatgcctaataasgtatagtcaatttggg

SEQ ID NO: 2094 - DNA, 33 bp, homo sapiens
aaaaaaaactttgggcrctttagatagctaaat

SEQ ID NO: 2095 - DNA, 33 bp, homo sapiens
ctggatgtaccctccaygtttttgtcatacgtt

SEQ ID NO: 2096 - DNA, 33 bp, homo sapiens
agtggtaaataagatamcatttaggattaaatc

SEQ ID NO: 2097 - DNA, 33 bp, homo sapiens
ccacccagcagaaaaayggatcatcctggcctc

SEQ ID NO: 2098 - DNA, 33 bp, homo sapiens
tgccgggccttggcccrctgaactcgctgactc

SEQ ID NO: 2099 - DNA, 33 bp, homo sapiens
cgagaaagaataatacraaagaagtgtggccag

SEQ ID NO: 2100 - DNA, 33 bp, homo sapiens
agccttagtttccatcraatgcagattataatc

SEQ ID NO: 2101 - DNA, 33 bp, homo sapiens
aagcaaatgtgaaataygaaacttttttggttc

SEQ ID NO: 2102 - DNA, 33 bp, homo sapiens
ttgctttcataggctgkacccttcaagcatttt

SEQ ID NO: 2103 - DNA, 33 bp, homo sapiens
atgatgatactgtgatraaaaccctcaatgata

SEQ ID NO: 2104 - DNA, 33 bp, homo sapiens
tactatgcttggaaackcttggtaatacaggat

SEQ ID NO: 2105 - DNA, 33 bp, homo sapiens
accaaaggctatgaggmattctggagtaaaaca

SEQ ID NO: 2106 - DNA, 33 bp, homo sapiens
gcactggaaacgtggcyagtttgaatccagatg

SEQ ID NO: 2107 - DNA, 33 bp, homo sapiens
tgaaggttcgttacatraacacatcacaggctt

SEQ ID NO: 2108 - DNA, 33 bp, homo sapiens
atgtagagcataatggkccatcaaaaaggaata

SEQ ID NO: 2109 - DNA, 33 bp, homo sapiens
tagtcagataattccaraggatctcttagacaa

SEQ ID NO: 2110 - DNA, 33 bp, homo sapiens
catagattcaatcaacygcagataaaaagatgt

SEQ ID NO: 2111 - DNA, 33 bp, homo sapiens
aaggcagatttgaaaartaggaagtaggctcag

SEQ ID NO: 2112 - DNA, 33 bp, homo sapiens
gcataaataaaggagaygaagggggcttccaga

SEQ ID NO: 2113 - DNA, 33 bp, homo sapiens
aattatgtcacagatakgattactcagtaggag

SEQ ID NO: 2114 - DNA, 33 bp, homo sapiens
cacaaggaagctgaaarggccctggaatcctat

SEQ ID NO: 2115 - DNA, 33 bp, homo sapiens
acacttaggttgattcsctgtcttagctattgt

SEQ ID NO: 2116 - DNA, 33 bp, homo sapiens
gattgttaatgaacackaagtcctaaacctaag

SEQ ID NO: 2117 - DNA, 33 bp, homo sapiens
tgcctagaggagtagcragaaatgatcctgagt

SEQ ID NO: 2118 - DNA, 33 bp, homo sapiens
gtgagaatgagtaagamcctggcagaaagctca

SEQ ID NO: 2119 - DNA, 33 bp, homo sapiens
gcaatatcaagtgagartccccctcaaagcctg

SEQ ID NO: 2120 - DNA, 33 bp, homo sapiens
atggtgtcctgattagkatgataaatcttatgg

SEQ ID NO: 2121 - DNA, 33 bp, homo sapiens
acagggaatccattatyagctttggcatggtga

SEQ ID NO: 2122 - DNA, 33 bp, homo sapiens
tcccttagggcaagaarctttccaatccagttt

SEQ ID NO: 2123 - DNA, 33 bp, homo sapiens
ttaaagcagtgagctcygaacccataaaattac

SEQ ID NO: 2124 - DNA, 33 bp, homo sapiens
aggctgtctacctcaawctagagccttggttaa

SEQ ID NO: 2125 - DNA, 33 bp, homo sapiens
gaagggtcagcagttayggagtaaaaatacaaa

SEQ ID NO: 2126 - DNA, 33 bp, homo sapiens
cagagtcaaccaaagartatgtagccaaaaagt

SEQ ID NO: 2127 - DNA, 33 bp, homo sapiens
aacaggctaaccaggayatttcttctcatggca

SEQ ID NO: 2128 - DNA, 33 bp, homo sapiens
acacaatgcaagataakgatctaactttcttct

SEQ ID NO: 2129 - DNA, 33 bp, homo sapiens
cattctatctcccttayagagtcattggaagct

SEQ ID NO: 2130 - DNA, 33 bp, homo sapiens
tagaagtataaatctarcctgagagtcaacact

SEQ ID NO: 2131 - DNA, 33 bp, homo sapiens
ggttgggtggcaagaamcttcatgtagagccca

SEQ ID NO: 2132 - DNA, 33 bp, homo sapiens
agtaagcactcaaaaartattagttgttgtttt

SEQ ID NO: 2133 - DNA, 33 bp, homo sapiens
ttgagggaaatgatacraactccaaatggacac

SEQ ID NO: 2134 - DNA, 33 bp, homo sapiens
atgaatatggatgcaarcaaacctaaataaaat

SEQ ID NO: 2135 - DNA, 33 bp, homo sapiens
ggattatttaatgagtraagaggctttctagtt

SEQ ID NO: 2136 - DNA, 33 bp, homo sapiens
gatgctatcctctgaartaactgtgagtacagt

SEQ ID NO: 2137 - DNA, 33 bp, homo sapiens
aaacagtatgatcaccratgaactgatatttac

SEQ ID NO: 2138 - DNA, 33 bp, homo sapiens
ttcttaacgtgtgaackgatttctaattaaatt

SEQ ID NO: 2139 - DNA, 33 bp, homo sapiens
ttaaaatgagcttgagkagattttaaagtcagg

SEQ ID NO: 2140 - DNA, 33 bp, homo sapiens
ccagtattctaaaaaamacagtgctgtaacagg

SEQ ID NO: 2141 - DNA, 33 bp, homo sapiens
ctaaatcaaacaatgartaacagttctgcaaac

SEQ ID NO: 2142 - DNA, 33 bp, homo sapiens
ttggagccagctgaagycagagttgtgaagttc

SEQ ID NO: 2143 - DNA, 33 bp, homo sapiens
taagtcaaagcaataayctgtggacgatagctt

SEQ ID NO: 2144 - DNA, 33 bp, homo sapiens
cataaaaattctcaaastcctgtctgtttttac

SEQ ID NO: 2145 - DNA, 33 bp, homo sapiens
cattttgcagctcaagrcaccctgaaagaatta

SEQ ID NO: 2146 - DNA, 33 bp, homo sapiens
caaataaattagctctkaactcttcatgtaaca

SEQ ID NO: 2147 - DNA, 33 bp, homo sapiens
tattctttccttccaargtccttctcagaaaag

SEQ ID NO: 2148 - DNA, 33 bp, homo sapiens
gagattccattaatgayggtgacaaaataatta

SEQ ID NO: 2149 - DNA, 33 bp, homo sapiens
ctcctgattaactgaarcgattccactttgtca

SEQ ID NO: 2150 - DNA, 33 bp, homo sapiens
ggtgaggaagatataamgtattactgaggtgtt

SEQ ID NO: 2151 - DNA, 33 bp, homo sapiens
tgattgttataacacargtgaaaccaaatgcat

SEQ ID NO: 2152 - DNA, 33 bp, homo sapiens
atagcaaagatgggacsaaatggaataaaatat

SEQ ID NO: 2153 - DNA, 33 bp, homo sapiens
cattaccagaactggaygaaaatgctgtcatct

SEQ ID NO: 2154 - DNA, 33 bp, homo sapiens
ttaaatgacctggaacmataaaaagaattgaat

SEQ ID NO: 2155 - DNA, 33 bp, homo sapiens
ctcagaaagatacctamcagcttcctatgtgag

SEQ ID NO: 2156 - DNA, 33 bp, homo sapiens
ctctgtaaaggcctaakaaaagcaaattactga

SEQ ID NO: 2157 - DNA, 33 bp, homo sapiens
ctggttctactggtaawctgtttttcaaaataa

SEQ ID NO: 2158 - DNA, 33 bp, homo sapiens
cctctatatctcaaagraaactcaatttcaact

SEQ ID NO: 2159 - DNA, 33 bp, homo sapiens
cctcctctaccatctaycggttgtttaaccttg

SEQ ID NO: 2160 - DNA, 33 bp, homo sapiens
atgactggatgtaccawgaaatttttctctgac

SEQ ID NO: 2161 - DNA, 33 bp, homo sapiens
tatctgcactttcgaarctgatacgacagattt

SEQ ID NO: 2162 - DNA, 33 bp, homo sapiens
ttaggtagaattcaccraaatcgaattaaattt

SEQ ID NO: 2163 - DNA, 33 bp, homo sapiens
aaatacatttagagcckgagaagaacttcttta

SEQ ID NO: 2164 - DNA, 33 bp, homo sapiens
ctacgacctaaaactcragtaatatatcaaagc

SEQ ID NO: 2165 - DNA, 33 bp, homo sapiens
ctcagctaaagaactcratgaatttcaactttg

SEQ ID NO: 2166 - DNA, 33 bp, homo sapiens
aagtttcacaaacaacrctttccattgctatgt

SEQ ID NO: 2167 - DNA, 33 bp, homo sapiens
cattcagtttcttagcrctattctaggccttat

SEQ ID NO: 2168 - DNA, 33 bp, homo sapiens
attaaaagtagtacagraagaggccaagagtgg

SEQ ID NO: 2169 - DNA, 33 bp, homo sapiens
attctcctggcatctaycaaactgtatatcatt

SEQ ID NO: 2170 - DNA, 33 bp, homo sapiens
gagaacttggagctgargtaggtggcttcctac

SEQ ID NO: 2171 - DNA, 33 bp, homo sapiens
aaaagaaggacttcacraccagttgtctgtggc

SEQ ID NO: 2172 - DNA, 33 bp, homo sapiens
aagatattgttgaaaawgtcaaaaaagcctgca

SEQ ID NO: 2173 - DNA, 33 bp, homo sapiens
gcttttctgaagttgaygcagatttcaaaaatg

SEQ ID NO: 2174 - DNA, 33 bp, homo sapiens
cagtggtaaggcaatasgtttaaaagagcataa

SEQ ID NO: 2175 - DNA, 33 bp, homo sapiens
ataatctaattgactascttctgttcaattacc

SEQ ID NO: 2176 - DNA, 33 bp, homo sapiens
aaaatacagatatacartagcttacctccatac

SEQ ID NO: 2177 - DNA, 33 bp, homo sapiens
cacagacattttcagcraagtttttgtctaatt

SEQ ID NO: 2178 - DNA, 33 bp, homo sapiens
agcattgctgaaagtamcctctaagatatgata

SEQ ID NO: 2179 - DNA, 33 bp, homo sapiens
acttagcactgaaagcwctcgtgttaaaacaaa

SEQ ID NO: 2180 - DNA, 33 bp, homo sapiens
actcttaggttagttayggcgaagagattccaa

SEQ ID NO: 2181 - DNA, 33 bp, homo sapiens
caaagtgtagaagatgraaaatctgattatcgt

SEQ ID NO: 2182 - DNA, 33 bp, homo sapiens
actgcacaatgcttgtyaaatggtgcttgtatt

SEQ ID NO: 2183 - DNA, 33 bp, homo sapiens
tatcaagttaacctgaygttggaaaatttcatt

SEQ ID NO: 2184 - DNA, 33 bp, homo sapiens
tactccacattccaaastaaacaagcctttttt

SEQ ID NO: 2185 - DNA, 33 bp, homo sapiens
aaaaccttgtgtctgamgtaacaatattcaatg

SEQ ID NO: 2186 - DNA, 33 bp, homo sapiens
aagaagactcaggagcrgaagtctgagaacctg

SEQ ID NO: 2187 - DNA, 33 bp, homo sapiens
cattttcagattgcacscacatacccagatgac

SEQ ID NO: 2188 - DNA, 33 bp, homo sapiens
catttcctcttcctcasaaataaggtaaacttt

SEQ ID NO: 2189 - DNA, 33 bp, homo sapiens
agccggtctccaagacracggcgtgcaggctgg

SEQ ID NO: 2190 - DNA, 33 bp, homo sapiens
attagctacaacacaargagtaaatggggtctc

SEQ ID NO: 2191 - DNA, 33 bp, homo sapiens
ggttggggaagccagasagtcaaattccaagag

SEQ ID NO: 2192 - DNA, 33 bp, homo sapiens
catccaccatgtaaggwcagagcaagaaggcct

SEQ ID NO: 2193 - DNA, 33 bp, homo sapiens
atcaaagatgaatcctmaggaaatgccttgtat

SEQ ID NO: 2194 - DNA, 33 bp, homo sapiens
tctcacagaaagtacasgaatgctgaatttctt

SEQ ID NO: 2195 - DNA, 33 bp, homo sapiens
aaagcccaggctataayctataatgctctatgc

SEQ ID NO: 2196 - DNA, 33 bp, homo sapiens
atgtttctgccactcartacaatcaacagtacc

SEQ ID NO: 2197 - DNA, 33 bp, homo sapiens
gaagaagtcatttgatracctaatagcagattg

SEQ ID NO: 2198 - DNA, 33 bp, homo sapiens
acttatagttggaataktatactcagcaaaagc

SEQ ID NO: 2199 - DNA, 33 bp, homo sapiens
cataaactggaaaacgsagaggagataaattcc

SEQ ID NO: 2200 - DNA, 33 bp, homo sapiens
tctaggctgagagttcyaaaagaaagcagctgg

SEQ ID NO: 2201 - DNA, 33 bp, homo sapiens
catttctgccgtccacrcagttgcttcttctcc

SEQ ID NO: 2202 - DNA, 33 bp, homo sapiens
attaccttacaaactcmactaattgaaatcttt

SEQ ID NO: 2203 - DNA, 33 bp, homo sapiens
taataggtgacattaarcacctacagtatacca

SEQ ID NO: 2204 - DNA, 33 bp, homo sapiens
ttctagaagtcaaaacygtggccaagaaaatga

SEQ ID NO: 2205 - DNA, 33 bp, homo sapiens
taaatttatgctaagawgaaatccaatttaaaa

SEQ ID NO: 2206 - DNA, 33 bp, homo sapiens
atacacaaaatgcactraacagttatttcatcc

SEQ ID NO: 2207 - DNA, 33 bp, homo sapiens
ctgaaagtaaagactcmaccaacaacgtttcat

SEQ ID NO: 2208 - DNA, 33 bp, homo sapiens
caccaaaagaaggtaaygacagaatagcaatcc

SEQ ID NO: 2209 - DNA, 33 bp, homo sapiens
agaggaaaaacaagacycaagttcagatggtta

SEQ ID NO: 2210 - DNA, 33 bp, homo sapiens
ggaggcaatagaggagracatcatgggactagc

SEQ ID NO: 2211 - DNA, 33 bp, homo sapiens
aacatgaggtgtcaggragatcactagtgccat

SEQ ID NO: 2212 - DNA, 33 bp, homo sapiens
ggggttcccagtttcargtcaggactcacagat

SEQ ID NO: 2213 - DNA, 33 bp, homo sapiens
tatacatagactaaaawtaggctggaaaaagat

SEQ ID NO: 2214 - DNA, 33 bp, homo sapiens
ttccctgtcacttatckgactcttcttttctgc

SEQ ID NO: 2215 - DNA, 33 bp, homo sapiens
tatatttatggatgacraaagggttataacagc

SEQ ID NO: 2216 - DNA, 33 bp, homo sapiens
gtgagatagaaccaggycacaatccttatttca

SEQ ID NO: 2217 - DNA, 33 bp, homo sapiens
aaaatcttaactgctcratgtggctaaagtcaa

SEQ ID NO: 2218 - DNA, 33 bp, homo sapiens
cacctttatgtgttcaygtttaactgttaacga

SEQ ID NO: 2219 - DNA, 33 bp, homo sapiens
cttgtcctagaaagagmaaattatgaagaatta

SEQ ID NO: 2220 - DNA, 33 bp, homo sapiens
cgcattgtggctaccgyaggtgaaatttatctc

SEQ ID NO: 2221 - DNA, 33 bp, homo sapiens
gtattgatatctgaaaycgaaaaccacactcat

SEQ ID NO: 2222 - DNA, 33 bp, homo sapiens
tgaagcaaaaataagaygtccagagtcaccttt

SEQ ID NO: 2223 - DNA, 33 bp, homo sapiens
tcaaagacaccaagtcraatgctataagaataa

SEQ ID NO: 2224 - DNA, 33 bp, homo sapiens
agaaaataagtgatgaraaaagcacataatctc

SEQ ID NO: 2225 - DNA, 33 bp, homo sapiens
gggggactggaactaaygaagaaatgttggttg

SEQ ID NO: 2226 - DNA, 33 bp, homo sapiens
ataaacgtgacagacartcatgcaacaaaggca

SEQ ID NO: 2227 - DNA, 33 bp, homo sapiens
ctagcacatccacaaaygtaacaacatagcata

SEQ ID NO: 2228 - DNA, 33 bp, homo sapiens
atttcacatttattcckcaatcttggtacctgc

SEQ ID NO: 2229 - DNA, 33 bp, homo sapiens
tgacagttggatatgayctttcttaagtttttg

SEQ ID NO: 2230 - DNA, 33 bp, homo sapiens
tatatgtgaccagaagyaaactgactgattagg

SEQ ID NO: 2231 - DNA, 33 bp, homo sapiens
tgcttaagtgtcattayctgtgtgggactatat

SEQ ID NO: 2232 - DNA, 33 bp, homo sapiens
gtatttctactccatakaatggaagctcttgta

SEQ ID NO: 2233 - DNA, 33 bp, homo sapiens
aacatctcataaatacrcagaaatacagaaagt

SEQ ID NO: 2234 - DNA, 33 bp, homo sapiens
gaatgatatctgagccraaggaggatgacacat

SEQ ID NO: 2235 - DNA, 33 bp, homo sapiens
ctctgtaattcatgtcsaaatttaatccccagt

SEQ ID NO: 2236 - DNA, 33 bp, homo sapiens
agtggtaaaattcaatratgaagccaatagatt

SEQ ID NO: 2237 - DNA, 33 bp, homo sapiens
tactgaaagaacacacraagatgtcctaatcac

SEQ ID NO: 2238 - DNA, 33 bp, homo sapiens
tggattaatagattaakgagttatcaggggagg

SEQ ID NO: 2239 - DNA, 33 bp, homo sapiens
tggcaccaccatttaartaactgggtgaccttg

SEQ ID NO: 2240 - DNA, 33 bp, homo sapiens
ataaggcagagagtggraagaatgggacaaaag

SEQ ID NO: 2241 - DNA, 33 bp, homo sapiens
taaattttgtattagaytccagttattgtattt

SEQ ID NO: 2242 - DNA, 33 bp, homo sapiens
agagattaaagaattgwcaaggcaaaaaagggg

SEQ ID NO: 2243 - DNA, 33 bp, homo sapiens
cagagaatgcctgctargtaaaagaggttacct

SEQ ID NO: 2244 - DNA, 33 bp, homo sapiens
aatattggctccatgarggtaaggaatgtctgt

SEQ ID NO: 2245 - DNA, 33 bp, homo sapiens
aaagcaacaacagtaaracaagacaaagatggt

SEQ ID NO: 2246 - DNA, 33 bp, homo sapiens
gtcagggtcataagtcracaacaaaaaggaaat

SEQ ID NO: 2247 - DNA, 33 bp, homo sapiens
aaagtgtgttttaatcyctcttactcagaagcg

SEQ ID NO: 2248 - DNA, 33 bp, homo sapiens
atagatgtatgttaaarctggtcctgagacatt

SEQ ID NO: 2249 - DNA, 33 bp, homo sapiens
ctaaacagtttacagayggcttgcaataatttt

SEQ ID NO: 2250 - DNA, 33 bp, homo sapiens
gaaccgtggcaaagcartgctcccatcttgacc

SEQ ID NO: 2251 - DNA, 33 bp, homo sapiens
caaagggtaagaaaagyctcccttctggaccat

SEQ ID NO: 2252 - DNA, 33 bp, homo sapiens
gagaacacatcagcaarataacagtcatggtct

SEQ ID NO: 2253 - DNA, 33 bp, homo sapiens
ttgaggtaaatttgagsattctatgtattgcat

SEQ ID NO: 2254 - DNA, 33 bp, homo sapiens
ctgatgccattttaacrctcttcttgtatttat

SEQ ID NO: 2255 - DNA, 33 bp, homo sapiens
ctgaagagtgagagaargttcaccaagttgaag

SEQ ID NO: 2256 - DNA, 33 bp, homo sapiens
atgtataaccaaggaamtggttgacagaagtga

SEQ ID NO: 2257 - DNA, 33 bp, homo sapiens
ttgaatatggaatagarcatcaattgcttgctc

SEQ ID NO: 2258 - DNA, 33 bp, homo sapiens
catgccatcagtgggargtggtaaattctgtcc

SEQ ID NO: 2259 - DNA, 33 bp, homo sapiens
ctcaattccctgtagcygaagaaagcttggcta

SEQ ID NO: 2260 - DNA, 33 bp, homo sapiens
gggaacttaggctaagragggttatgacataaa

SEQ ID NO: 2261 - DNA, 33 bp, homo sapiens
attattcactattaacygatggaaaacacacct

SEQ ID NO: 2262 - DNA, 33 bp, homo sapiens
tgagtagtagagttacrgagacagaggtgggtc

SEQ ID NO: 2263 - DNA, 33 bp, homo sapiens
gtgatatgaagtaaaartggttactgtgatcac

SEQ ID NO: 2264 - DNA, 33 bp, homo sapiens
gtataaaaggataccartgaagagaattaggtt

SEQ ID NO: 2265 - DNA, 33 bp, homo sapiens
tcaaatatgccaggaaratggtgaaatcagtca

SEQ ID NO: 2266 - DNA, 33 bp, homo sapiens
tattttgaaagcaaatmatcatgactgggtgtg

SEQ ID NO: 2267 - DNA, 33 bp, homo sapiens
tgagggagctggttgtmaaaatagtaatttcca

SEQ ID NO: 2268 - DNA, 33 bp, homo sapiens
gcctctaggacatatamaatgcaatatttgact

SEQ ID NO: 2269 - DNA, 33 bp, homo sapiens
ttttagtatgtaaagcrcaataatttttgcagt

SEQ ID NO: 2270 - DNA, 33 bp, homo sapiens
acaatacagtatgagakaggagtaaatgttatg

SEQ ID NO: 2271 - DNA, 33 bp, homo sapiens
ttcacttcctacctcaytcagagaggctgggag

SEQ ID NO: 2272 - DNA, 33 bp, homo sapiens
tggtctcaggtgtgtargaatccatttataagc

SEQ ID NO: 2273 - DNA, 33 bp, homo sapiens
gggtgtattgttcacayagaaaataactgcaca

SEQ ID NO: 2274 - DNA, 33 bp, homo sapiens
cctgaatgccagaccasagtctaaacattctcc

SEQ ID NO: 2275 - DNA, 33 bp, homo sapiens
atttaacgtccccagargatgagatgatgtctt

SEQ ID NO: 2276 - DNA, 33 bp, homo sapiens
agagatgtaactggggratcacaaaaagagagt

SEQ ID NO: 2277 - DNA, 33 bp, homo sapiens
ctactctgttaacaaaytccttcctacttctct

SEQ ID NO: 2278 - DNA, 33 bp, homo sapiens
cctgaactaattgacasagaatatggtgtagct

SEQ ID NO: 2279 - DNA, 33 bp, homo sapiens
cccttttccttagtggmagcgactttatcttat

SEQ ID NO: 2280 - DNA, 33 bp, homo sapiens
ataagattcctggtacracgtctggaacatact

SEQ ID NO: 2281 - DNA, 33 bp, homo sapiens
gatactttactgtatarggcacttgtattttat

SEQ ID NO: 2282 - DNA, 33 bp, homo sapiens
gacctcaggaggctatyaaccatctctgattat

SEQ ID NO: 2283 - DNA, 33 bp, homo sapiens
tataggatattatcccyccagccgtggacttaa

SEQ ID NO: 2284 - DNA, 33 bp, homo sapiens
cttatctttccaaatcyctccttattgggtgct

SEQ ID NO: 2285 - DNA, 33 bp, homo sapiens
gatactgcacattaagrccgtgctttcaaaact

SEQ ID NO: 2286 - DNA, 33 bp, homo sapiens
caacatcaaagctcaartaaagagacacctgac

SEQ ID NO: 2287 - DNA, 33 bp, homo sapiens
ctccttattcatcacakcatctagggttccaac

SEQ ID NO: 2288 - DNA, 33 bp, homo sapiens
attctctgtggaagcaytgatgataactttggg

SEQ ID NO: 2289 - DNA, 33 bp, homo sapiens
agcttttagaagtgacrgactatacataaacag

SEQ ID NO: 2290 - DNA, 33 bp, homo sapiens
atgtcaaagataccacmatgtcaagccaatatc

SEQ ID NO: 2291 - DNA, 33 bp, homo sapiens
accttatgatctgaaastgtgttcttattttca

SEQ ID NO: 2292 - DNA, 33 bp, homo sapiens
tagttattgactgctargcagaaacaagcattc

SEQ ID NO: 2293 - DNA, 33 bp, homo sapiens
ttacctcctctacctcyaaatgttggagttccc

SEQ ID NO: 2294 - DNA, 33 bp, homo sapiens
acctctaggccagcagratcaatgttgtgggaa

SEQ ID NO: 2295 - DNA, 33 bp, homo sapiens
ggggtgttaggggaagsatattatcaggataaa

SEQ ID NO: 2296 - DNA, 33 bp, homo sapiens
acaatgttttaccttcmagcaaaagtgtcgaaa

SEQ ID NO: 2297 - DNA, 33 bp, homo sapiens
ctgcaaatatgagaccyaaggcagagccagatg

SEQ ID NO: 2298 - DNA, 33 bp, homo sapiens
cattgtgtggattgtcrgaaaactagaaagatg

SEQ ID NO: 2299 - DNA, 33 bp, homo sapiens
tctctctattctcccartctcttaagtagtact

SEQ ID NO: 2300 - DNA, 33 bp, homo sapiens
caaactgctttgcaggwacgacgataattccag

SEQ ID NO: 2301 - DNA, 33 bp, homo sapiens
tctgcactaggggaagkcaagaccagtcaggtg

SEQ ID NO: 2302 - DNA, 33 bp, homo sapiens
gtagacagtaagaggcracggagtgtaaacaga

SEQ ID NO: 2303 - DNA, 33 bp, homo sapiens
ttggaacatttccccasattatttgcatcatct

SEQ ID NO: 2304 - DNA, 33 bp, homo sapiens
tggtaaaaatgagacascaataatctacattta

SEQ ID NO: 2305 - DNA, 33 bp, homo sapiens
taaacatttctaccacrgatggattgcttcata

SEQ ID NO: 2306 - DNA, 33 bp, homo sapiens
gcatagataaaacccasatctttggaacagcag

SEQ ID NO: 2307 - DNA, 33 bp, homo sapiens
atctccatactgtgccrcattttatttttaaaa

SEQ ID NO: 2308 - DNA, 33 bp, homo sapiens
tcttttcttgacctagyatatcagtgacagttg

SEQ ID NO: 2309 - DNA, 33 bp, homo sapiens
caacctttgtgttgtaycagcattttaaaacta

SEQ ID NO: 2310 - DNA, 33 bp, homo sapiens
aaacctcttccacgtcrctgttctttccaccca

SEQ ID NO: 2311 - DNA, 33 bp, homo sapiens
tctggatatatctgtayctgaacccagctctgt

SEQ ID NO: 2312 - DNA, 33 bp, homo sapiens
ataggatctcaagagcraacacaaaatttcttc

SEQ ID NO: 2313 - DNA, 33 bp, homo sapiens
agtaccaaatagacaartcaggctgtttaccag

SEQ ID NO: 2314 - DNA, 33 bp, homo sapiens
aggaacatggacttatsagaagcaactagtagg

SEQ ID NO: 2315 - DNA, 33 bp, homo sapiens
aggcaaaaacaaagtaragacctatatgtgaag

SEQ ID NO: 2316 - DNA, 33 bp, homo sapiens
cctgcccacaacaaatrattgtcaggtcccaga

SEQ ID NO: 2317 - DNA, 33 bp, homo sapiens
tatggtcttggtctacratatgtttttaatttt

SEQ ID NO: 2318 - DNA, 33 bp, homo sapiens
ccttgactcaaaagtcraggtctagtgggaaaa

SEQ ID NO: 2319 - DNA, 33 bp, homo sapiens
ggaacaaactgactgayggtctaagtgccaggc

SEQ ID NO: 2320 - DNA, 33 bp, homo sapiens
ggtaaaatttttcagayccatcatcggtgggtc

SEQ ID NO: 2321 - DNA, 33 bp, homo sapiens
cctgaccagcatataartcattgttcacatttt

SEQ ID NO: 2322 - DNA, 33 bp, homo sapiens
tttagatcagagcccaytcttcctctcttgtgt

SEQ ID NO: 2323 - DNA, 33 bp, homo sapiens
gggagatgctagacaaygtagaatttcttacaa

SEQ ID NO: 2324 - DNA, 33 bp, homo sapiens
aggtacagactgagcawgatgtaataaaatact

SEQ ID NO: 2325 - DNA, 33 bp, homo sapiens
tccagcataaaggacaygtgtcataacagagta

SEQ ID NO: 2326 - DNA, 33 bp, homo sapiens
gaggtgttcctactcaygagcaaggctaattcc

SEQ ID NO: 2327 - DNA, 33 bp, homo sapiens
tatggtcttctaaatargcagatgtatatacaa

SEQ ID NO: 2328 - DNA, 33 bp, homo sapiens
ggaccctcgccaaacaytaagtctgctaacacc

SEQ ID NO: 2329 - DNA, 33 bp, homo sapiens
cacttatcagtcaaaargagagatgaaatccac

SEQ ID NO: 2330 - DNA, 33 bp, homo sapiens
tgctgctgctctaatgmatccagtgttttggtg

SEQ ID NO: 2331 - DNA, 33 bp, homo sapiens
gtaggtaccatctctgraaaaaagctgggtctc

SEQ ID NO: 2332 - DNA, 33 bp, homo sapiens
ctctgtatttcctgaawtgaatggtggcctgcc

SEQ ID NO: 2333 - DNA, 33 bp, homo sapiens
ggagaaggatgaataayggaaatataccaataa

SEQ ID NO: 2334 - DNA, 33 bp, homo sapiens
ccagagagtgaattcaygccttccaaaatgtga

SEQ ID NO: 2335 - DNA, 33 bp, homo sapiens
gctgtaatggctgtcaycattggaaaacaatga

SEQ ID NO: 2336 - DNA, 33 bp, homo sapiens
tttaacatcactaaaamtacaagcaaatttaaa

SEQ ID NO: 2337 - DNA, 33 bp, homo sapiens
catacagagagtgtggycaactttggaattaaa

SEQ ID NO: 2338 - DNA, 33 bp, homo sapiens
actaattgctgacttcmagaattaagactcaga

SEQ ID NO: 2339 - DNA, 33 bp, homo sapiens
atgcagcaaatgcttcmaataatagtaaactat

SEQ ID NO: 2340 - DNA, 33 bp, homo sapiens
atcttcccacttactayactcttcttaccaggt

SEQ ID NO: 2341 - DNA, 33 bp, homo sapiens
tcaaagccccttccaastgtgtaaattgtatca

SEQ ID NO: 2342 - DNA, 33 bp, homo sapiens
tcagtttcttacctacrcaatcaagatagtagt

SEQ ID NO: 2343 - DNA, 33 bp, homo sapiens
tttctttcctgtcatartatcaggggaatagaa

SEQ ID NO: 2344 - DNA, 33 bp, homo sapiens
tgtaacttcttgtcacracattattcttcatag

SEQ ID NO: 2345 - DNA, 33 bp, homo sapiens
taaggacccagtaataygcaaagtaaaaataat

SEQ ID NO: 2346 - DNA, 33 bp, homo sapiens
gaaataggggaatgggycacgtctggatcacct

SEQ ID NO: 2347 - DNA, 33 bp, homo sapiens
ttatttaatgaattctsaatataaccttgtctg

SEQ ID NO: 2348 - DNA, 33 bp, homo sapiens
aagaccaaaaccaccaractgactatagttacc

SEQ ID NO: 2349 - DNA, 33 bp, homo sapiens
ttttctagaggcataaygattcaggaaaagttg

SEQ ID NO: 2350 - DNA, 33 bp, homo sapiens
atttaaggtgagacttsaaagccaagaagatgt

SEQ ID NO: 2351 - DNA, 33 bp, homo sapiens
tgtaaactgtaggacakaaaaagagtgctcagc

SEQ ID NO: 2352 - DNA, 33 bp, homo sapiens
caaaccatatcttgccrccactgataatgttgc

SEQ ID NO: 2353 - DNA, 33 bp, homo sapiens
catatgaataagacacrgaaattttatgaagac

SEQ ID NO: 2354 - DNA, 33 bp, homo sapiens
caaagcaggtcacaaakccatccaagactggga

SEQ ID NO: 2355 - DNA, 33 bp, homo sapiens
tgaaggaaaaggaggargaacagcagtatatct

SEQ ID NO: 2356 - DNA, 33 bp, homo sapiens
tcgtgttattttatgcrctttgcttatgcttat

SEQ ID NO: 2357 - DNA, 33 bp, homo sapiens
aatccttttctgcactraaaattcgagttcatg

SEQ ID NO: 2358 - DNA, 33 bp, homo sapiens
tagagaggcaacttctracaaaatgaggaaaat

SEQ ID NO: 2359 - DNA, 33 bp, homo sapiens
atctttcagagcatgayccagtagagatggcag

SEQ ID NO: 2360 - DNA, 33 bp, homo sapiens
agctatctactactcakgcaaataggattatct

SEQ ID NO: 2361 - DNA, 33 bp, homo sapiens
catccttctcccaagamacaatgtggcccctca

SEQ ID NO: 2362 - DNA, 33 bp, homo sapiens
agaatcttccttctggratcctactttttatgt

SEQ ID NO: 2363 - DNA, 33 bp, homo sapiens
cagtaaccatgagcacmgagatagcaatggagg

SEQ ID NO: 2364 - DNA, 33 bp, homo sapiens
acctgtcaattatgtcraattctcctaagaatt

SEQ ID NO: 2365 - DNA, 33 bp, homo sapiens
tcataatgcatacttayatttatgtgacattct

SEQ ID NO: 2366 - DNA, 33 bp, homo sapiens
agccagtcttaaatggragaaccaatgagcagg

SEQ ID NO: 2367 - DNA, 33 bp, homo sapiens
cttgtccctactttccragcatctgattcggct

SEQ ID NO: 2368 - DNA, 33 bp, homo sapiens
ttagtgaagcagagcayctttgcatacatttgt

SEQ ID NO: 2369 - DNA, 33 bp, homo sapiens
acttaaatgtttgccgragtagtgaggtaactc

SEQ ID NO: 2370 - DNA, 33 bp, homo sapiens
agtttaaggaaattgcygaacaactttgctgtt

SEQ ID NO: 2371 - DNA, 33 bp, homo sapiens
gcccacctccatgaackatctctcatcacacca

SEQ ID NO: 2372 - DNA, 33 bp, homo sapiens
aattacacagttctgcygacactttgagtttag

SEQ ID NO: 2373 - DNA, 33 bp, homo sapiens
gcctgtgatatttaccraagtgttatataacag

SEQ ID NO: 2374 - DNA, 33 bp, homo sapiens
tctagaattgagtaagwcagtgcttataagagg

SEQ ID NO: 2375 - DNA, 33 bp, homo sapiens
aagattaaccatgctgmaaaatgccaaagaaaa

SEQ ID NO: 2376 - DNA, 33 bp, homo sapiens
gtgtcgcctacacaacygtctatctttcattat

SEQ ID NO: 2377 - DNA, 33 bp, homo sapiens
ttccattgttctgatascattctggatggatgg

SEQ ID NO: 2378 - DNA, 33 bp, homo sapiens
aacaacctgtgtgaagmcattttgagcttgttt

SEQ ID NO: 2379 - DNA, 33 bp, homo sapiens
tttgtgtatgggagggraaagtgaaatttttat

SEQ ID NO: 2380 - DNA, 33 bp, homo sapiens
ccatttgcttattgaarctctacctggatacct

SEQ ID NO: 2381 - DNA, 33 bp, homo sapiens
caggtctatttggtccyacagtctataaacctg

SEQ ID NO: 2382 - DNA, 33 bp, homo sapiens
tactcaccagcaggaaraaactagaggcttcag

SEQ ID NO: 2383 - DNA, 33 bp, homo sapiens
gaaatgtccttatttcrcaagggcaacagcgag

SEQ ID NO: 2384 - DNA, 33 bp, homo sapiens
atctttataaatgaacwgccactgatttttcta

SEQ ID NO: 2385 - DNA, 33 bp, homo sapiens
ttacaggaaccttggcraagtgtatacagactg

SEQ ID NO: 2386 - DNA, 33 bp, homo sapiens
atttggacacaccgatyaacacatagatacatg

SEQ ID NO: 2387 - DNA, 33 bp, homo sapiens
agccctaaggaagaacmcttcagacaacaaatc

SEQ ID NO: 2388 - DNA, 33 bp, homo sapiens
tgcatctgagttcaaasgtctgtcactcactgg

SEQ ID NO: 2389 - DNA, 33 bp, homo sapiens
ctgggttgatggaggaygagaaggatcagggag

SEQ ID NO: 2390 - DNA, 33 bp, homo sapiens
gactttgtctacatccrgagagagtgcccacaa

SEQ ID NO: 2391 - DNA, 33 bp, homo sapiens
tgcatatgattgaagcrgaaagagtaaaactaa

SEQ ID NO: 2392 - DNA, 33 bp, homo sapiens
agtgactggcagaatckgaacaccaagaaaggg

SEQ ID NO: 2393 - DNA, 33 bp, homo sapiens
tcttgtctttgtctccrgatgttgatatggccc

SEQ ID NO: 2394 - DNA, 33 bp, homo sapiens
cagtgaccaaagcaccrcaattttagacacagt

SEQ ID NO: 2395 - DNA, 33 bp, homo sapiens
ctggactaaataatagraagtggctataagggt

SEQ ID NO: 2396 - DNA, 33 bp, homo sapiens
tgagtgcttctggtcaygcgggccagaactgct

SEQ ID NO: 2397 - DNA, 33 bp, homo sapiens
ttagccagagcccgaamaggctgcattctcctg

SEQ ID NO: 2398 - DNA, 33 bp, homo sapiens
tgtgtgcacatgtgggragacactggctgggga

SEQ ID NO: 2399 - DNA, 33 bp, homo sapiens
aacaagatgctgggatractgtacccctcttca

SEQ ID NO: 2400 - DNA, 33 bp, homo sapiens
gaggaaaccattaaaarttggggctcctactct

SEQ ID NO: 2401 - DNA, 33 bp, homo sapiens
agagaccacaagcaaastagttcgggcagcctc

SEQ ID NO: 2402 - DNA, 33 bp, homo sapiens
gaagaaccctttggccygccaggtagccgccag

SEQ ID NO: 2403 - DNA, 33 bp, homo sapiens
agggcgaaactcctaayctcagagagtccaaca

SEQ ID NO: 2404 - DNA, 33 bp, homo sapiens
gtgctggctgggacccrccgtgcaatgctgcag

SEQ ID NO: 2405 - DNA, 33 bp, homo sapiens
aagcatttacaaatcakcaagaaaaagataaac

SEQ ID NO: 2406 - DNA, 33 bp, homo sapiens
cccaaatatctgtcaascgatgaatgagcaaac

SEQ ID NO: 2407 - DNA, 33 bp, homo sapiens
gagagactcagtgtaaygagcacccacttatcc

SEQ ID NO: 2408 - DNA, 33 bp, homo sapiens
tgagctatccaaaggargtttacacaattctaa

SEQ ID NO: 2409 - DNA, 33 bp, homo sapiens
tgtattatcatgaccakaagtatttttcacagc

SEQ ID NO: 2410 - DNA, 33 bp, homo sapiens
agttaatttctgtttcrcacaagttgttttaga

SEQ ID NO: 2411 - DNA, 33 bp, homo sapiens
atgattggatccagagmataacgtgattgatga

SEQ ID NO: 2412 - DNA, 33 bp, homo sapiens
ctgccctacaggaatcracaacagcttgaagtg

SEQ ID NO: 2413 - DNA, 33 bp, homo sapiens
cagctagaaaagaggaytcagtgtagagccaca

SEQ ID NO: 2414 - DNA, 33 bp, homo sapiens
gatcggtggacctgagrccaaactgccgattac

SEQ ID NO: 2415 - DNA, 33 bp, homo sapiens
tggcaagcctcggctayacttggataaactttc

SEQ ID NO: 2416 - DNA, 33 bp, homo sapiens
ttcattagaaaataaawactgggcatttgatta

SEQ ID NO: 2417 - DNA, 33 bp, homo sapiens
ttcaagggcggatgaakggcagcccgagcagcc

SEQ ID NO: 2418 - DNA, 33 bp, homo sapiens
ttaattctgttttagaycccatatgaagcccct

SEQ ID NO: 2419 - DNA, 33 bp, homo sapiens
gagcagtctttaaacaygggcagtgcacgcaca

SEQ ID NO: 2420 - DNA, 33 bp, homo sapiens
ctgctctttgcaattawaggcactccaaggcca

SEQ ID NO: 2421 - DNA, 33 bp, homo sapiens
tctattcactctaaaayggcagcagggttgagt

SEQ ID NO: 2422 - DNA, 33 bp, homo sapiens
ttcaccgaaaagacctraaagcagtgtctcaaa

SEQ ID NO: 2423 - DNA, 33 bp, homo sapiens
ggttgatgaggtgaaaragtgcttgcggcctca

SEQ ID NO: 2424 - DNA, 33 bp, homo sapiens
ggtcgggtgagtcaaarggagaataatcggtga

SEQ ID NO: 2425 - DNA, 33 bp, homo sapiens
agcctggttactgtcgmagaagcaggacaggcc

SEQ ID NO: 2426 - DNA, 33 bp, homo sapiens
ggctgtgtggacagacrggtaaagatgacacca

SEQ ID NO: 2427 - DNA, 33 bp, homo sapiens
tatccttgacagtcaaygattccaccaggatgt

SEQ ID NO: 2428 - DNA, 33 bp, homo sapiens
cgggatgctgtcttccygagaatgcagtgtgat

SEQ ID NO: 2429 - DNA, 33 bp, homo sapiens
tctgaacttagacacayctaaccttgcccccac

SEQ ID NO: 2430 - DNA, 33 bp, homo sapiens
attcttttaaatactcrcggctgttcttgaact

SEQ ID NO: 2431 - DNA, 33 bp, homo sapiens
tttgactggccttataygaaatgctcaggggag

SEQ ID NO: 2432 - DNA, 33 bp, homo sapiens
ttagggccactgtaacygcaaactgggtggcgt

SEQ ID NO: 2433 - DNA, 33 bp, homo sapiens
catgctccttatcacgmcctttgtcctagttgg

SEQ ID NO: 2434 - DNA, 33 bp, homo sapiens
gttcctcctctattcartcccagcatctgggtc

SEQ ID NO: 2435 - DNA, 33 bp, homo sapiens
atgggggctctgcctcraatgcctggtcagtct

SEQ ID NO: 2436 - DNA, 33 bp, homo sapiens
gaactgtgtaatctcckacttgggcttcacccc

SEQ ID NO: 2437 - DNA, 33 bp, homo sapiens
gaaaagcaggtaagaarcccgttctatggagct

SEQ ID NO: 2438 - DNA, 33 bp, homo sapiens
ctcctgctttgcttcayactgggttagcagtca

SEQ ID NO: 2439 - DNA, 33 bp, homo sapiens
ctgtttatatccattaraaattgagtagagtat

SEQ ID NO: 2440 - DNA, 33 bp, homo sapiens
ctgcacacgttctatcmcacaagcttgctagat

SEQ ID NO: 2441 - DNA, 33 bp, homo sapiens
ggtgattgaatgatgasagcaggtctttctatg

SEQ ID NO: 2442 - DNA, 33 bp, homo sapiens
gacaataccaaatgtcragaaggcagaggagca

SEQ ID NO: 2443 - DNA, 33 bp, homo sapiens
acaccaaaacacattaycatgaaatttaaaact

SEQ ID NO: 2444 - DNA, 33 bp, homo sapiens
agagtttatcagagccyaagaatagacttgtgg

SEQ ID NO: 2445 - DNA, 33 bp, homo sapiens
gtttcaaaagacagggmaagccaatccaaacat

SEQ ID NO: 2446 - DNA, 33 bp, homo sapiens
aatgtaattaaaatgcmatgtataaaatagatt

SEQ ID NO: 2447 - DNA, 33 bp, homo sapiens
cctgagattagcaatcrcacatggtttatttta

SEQ ID NO: 2448 - DNA, 33 bp, homo sapiens
ctttaataatttctacygaagtttgccctttgt

SEQ ID NO: 2449 - DNA, 33 bp, homo sapiens
tggtctccatgaactawaaggggttaccataaa

SEQ ID NO: 2450 - DNA, 33 bp, homo sapiens
acctttgacctaaagaygttgctatattcacat

SEQ ID NO: 2451 - DNA, 33 bp, homo sapiens
ttgcctttaatgtttamcatccacacttatttg

SEQ ID NO: 2452 - DNA, 33 bp, homo sapiens
tattagaggagtataarccacaaaatgttatta

SEQ ID NO: 2453 - DNA, 33 bp, homo sapiens
aagcagaatattcaagycaagagaagtgtaagt

SEQ ID NO: 2454 - DNA, 33 bp, homo sapiens
ccaaccttggctgttaygagtattttagaagct

SEQ ID NO: 2455 - DNA, 33 bp, homo sapiens
gtgactagtctcgtatyactgtcagcgtcctct

SEQ ID NO: 2456 - DNA, 33 bp, homo sapiens
gccaatgatatgagagmagaataaggtgagagc

SEQ ID NO: 2457 - DNA, 33 bp, homo sapiens
acgcccacatagagtasgagataaagggctaag

SEQ ID NO: 2458 - DNA, 33 bp, homo sapiens
gttacattcatacaatmatgcacaggcaatgaa

SEQ ID NO: 2459 - DNA, 33 bp, homo sapiens
agctaggtgtaaagtcrgacaagcctgggattg

SEQ ID NO: 2460 - DNA, 33 bp, homo sapiens
aaactgagcatcatctkaagtcttctttatgaa

SEQ ID NO: 2461 - DNA, 33 bp, homo sapiens
ctgatttatggctccayatggtcaccctttcta

SEQ ID NO: 2462 - DNA, 33 bp, homo sapiens
tccaactctataaacamagttgagtctatccac

SEQ ID NO: 2463 - DNA, 33 bp, homo sapiens
gctacaacacaagagargagtttggtcccaagt

SEQ ID NO: 2464 - DNA, 33 bp, homo sapiens
catgccacgacaatgayacaggtcacatgggta

SEQ ID NO: 2465 - DNA, 33 bp, homo sapiens
ctgtgtaaagaaaagcrgaaagaacagtacgat

SEQ ID NO: 2466 - DNA, 33 bp, homo sapiens
tggtgtccaacttgcayccagtgataattccag

SEQ ID NO: 2467 - DNA, 33 bp, homo sapiens
aagtaatcgaaaaggaraaagtggtactcctca

SEQ ID NO: 2468 - DNA, 33 bp, homo sapiens
tgttggaggaccaagakgttgaatgtgagatag

SEQ ID NO: 2469 - DNA, 33 bp, homo sapiens
acatctttgaacagaayatagcaccatggtggg

SEQ ID NO: 2470 - DNA, 33 bp, homo sapiens
tgacataggactttccratggattctggtgact

SEQ ID NO: 2471 - DNA, 33 bp, homo sapiens
tttttattttatattarcatcttgctatgtctc

SEQ ID NO: 2472 - DNA, 33 bp, homo sapiens
acgaggaagtatgacascacggctagggttttc

SEQ ID NO: 2473 - DNA, 33 bp, homo sapiens
acttggaaagagttgargtctaggatatccctt

SEQ ID NO: 2474 - DNA, 33 bp, homo sapiens
gaaaaagtttgttctcwaaatgtggataattca

SEQ ID NO: 2475 - DNA, 33 bp, homo sapiens
gatgcaattagagatargctttaggaagatctt

SEQ ID NO: 2476 - DNA, 33 bp, homo sapiens
ttcagaacctgagttamgacatgagcgatgatc

SEQ ID NO: 2477 - DNA, 33 bp, homo sapiens
tgtaaaacgcaaagaakcatatttagtataagc

SEQ ID NO: 2478 - DNA, 33 bp, homo sapiens
tcagaattgtgtttaawgacttgttgaacatta

SEQ ID NO: 2479 - DNA, 33 bp, homo sapiens
acgaatactgtaaaccraattaatgcagtcatt

SEQ ID NO: 2480 - DNA, 33 bp, homo sapiens
agcagtatagtatcaaytctgtttgtgttgtgt

SEQ ID NO: 2481 - DNA, 33 bp, homo sapiens
aacacaaagtaagagamaaatgtggtactaata

SEQ ID NO: 2482 - DNA, 33 bp, homo sapiens
ctcaaagaattagaaartctgacaaccctgggc

SEQ ID NO: 2483 - DNA, 33 bp, homo sapiens
gcttagaaacttagaarcaaacatacccataga

SEQ ID NO: 2484 - DNA, 33 bp, homo sapiens
tgactggccaagcacaytataatcagagagttg

SEQ ID NO: 2485 - DNA, 33 bp, homo sapiens
catggtgtcacttggcwctttttctgtcagcct

SEQ ID NO: 2486 - DNA, 33 bp, homo sapiens
ctctatcagaaactcamggtagaaatcttcctt

SEQ ID NO: 2487 - DNA, 33 bp, homo sapiens
atccccaacattgccargaagacaggaatcaca

SEQ ID NO: 2488 - DNA, 33 bp, homo sapiens
tgtcacacttgagaacycctctggcttgctcag

SEQ ID NO: 2489 - DNA, 33 bp, homo sapiens
gatttgtgtcagtacaytatgatggttgcacaa

SEQ ID NO: 2490 - DNA, 33 bp, homo sapiens
ctagagttaatgtcaartgagaggaatatacaa

SEQ ID NO: 2491 - DNA, 33 bp, homo sapiens
atagagattgaaagaaygattttatgcctacta

SEQ ID NO: 2492 - DNA, 33 bp, homo sapiens
gcagaatttcacaaaamccctgactctgtgatg

SEQ ID NO: 2493 - DNA, 33 bp, homo sapiens
aatatgaagcataatartagagatgacttagaa

SEQ ID NO: 2494 - DNA, 33 bp, homo sapiens
tcagttttccattgagraaatgcctcttttgtg

SEQ ID NO: 2495 - DNA, 33 bp, homo sapiens
ggaagcagaccctgaaygtttgttagtgatcaa

SEQ ID NO: 2496 - DNA, 33 bp, homo sapiens
tgttccattttatagaygaggtaactgaagcac

SEQ ID NO: 2497 - DNA, 33 bp, homo sapiens
agatgaaagcacagaayatatccacagtgatcc

SEQ ID NO: 2498 - DNA, 33 bp, homo sapiens
ggagcccagaaggtcaygggtaaactcctgcac

SEQ ID NO: 2499 - DNA, 33 bp, homo sapiens
aaaatgttgctaggcayctgtatctctttgata

SEQ ID NO: 2500 - DNA, 33 bp, homo sapiens
gagtagaggatgactartaacactaaggataaa

SEQ ID NO: 2501 - DNA, 33 bp, homo sapiens
tggacaattctgaaacrgcggaaaatggttttg

SEQ ID NO: 2502 - DNA, 33 bp, homo sapiens
tggtggggtatcctaartctaccttttcctata

SEQ ID NO: 2503 - DNA, 33 bp, homo sapiens
cccctcctcagtaaacragatcgttctctctgt

SEQ ID NO: 2504 - DNA, 33 bp, homo sapiens
tgaatcttccctttgtyaagcatatgcacactg

SEQ ID NO: 2505 - DNA, 33 bp, homo sapiens
ttgtaggattattgtgractttatgaattatta

SEQ ID NO: 2506 - DNA, 33 bp, homo sapiens
ctaaggactgggagtaygggtttgtgctgtgtt

SEQ ID NO: 2507 - DNA, 33 bp, homo sapiens
atccctgctagtgggamagtcggccatcttctt

SEQ ID NO: 2508 - DNA, 33 bp, homo sapiens
ctagaggccaagtcacygtatcaaaggctgaga

SEQ ID NO: 2509 - DNA, 33 bp, homo sapiens
caaatccaaacctcaawaagatgcaacttcaca

SEQ ID NO: 2510 - DNA, 33 bp, homo sapiens
accggaagatcctacaygagaatgaaaccagca

SEQ ID NO: 2511 - DNA, 33 bp, homo sapiens
ggcaccctccctttgcrctggccatcgggtgag

SEQ ID NO: 2512 - DNA, 33 bp, homo sapiens
ttccccctttgagcctyagctacctcacctatc

SEQ ID NO: 2513 - DNA, 33 bp, homo sapiens
accatttccctagcgayggacatttaggttatt

SEQ ID NO: 2514 - DNA, 33 bp, homo sapiens
agtgaaaacttggatayggcataactatggagc

SEQ ID NO: 2515 - DNA, 33 bp, homo sapiens
tcgccatggtctcgagyatgacaggttggtccc

SEQ ID NO: 2516 - DNA, 33 bp, homo sapiens
gtgttccagggaacagrctctacctcaaaggaa

SEQ ID NO: 2517 - DNA, 33 bp, homo sapiens
gcctggcctatgcttakctttttaatagggttt

SEQ ID NO: 2518 - DNA, 33 bp, homo sapiens
gacgtgtagtagttaaygcactgggcttggtaa

SEQ ID NO: 2519 - DNA, 33 bp, homo sapiens
gagtattcttgtacccscttccagaaaggacta

SEQ ID NO: 2520 - DNA, 33 bp, homo sapiens
ctcacttagatgatgasagagggtttatccacc

SEQ ID NO: 2521 - DNA, 33 bp, homo sapiens
ccttggtcacttcccaratcccttcggattcct

SEQ ID NO: 2522 - DNA, 33 bp, homo sapiens
cagactgaagtttagcsaaatctatgaaaaaag

SEQ ID NO: 2523 - DNA, 33 bp, homo sapiens
cagtgctttttagcacyggaggcaaagctgaaa

SEQ ID NO: 2524 - DNA, 33 bp, homo sapiens
ttccactaagaacgacrcagagtgaatccaaga

SEQ ID NO: 2525 - DNA, 33 bp, homo sapiens
catggcctctggggacwccttcttcttttttgc

SEQ ID NO: 2526 - DNA, 33 bp, homo sapiens
gccctcctgactttccmagtggacctttccagg

SEQ ID NO: 2527 - DNA, 33 bp, homo sapiens
tttttttaattgtgagyccacaaaacatgctat

SEQ ID NO: 2528 - DNA, 33 bp, homo sapiens
ggaaaccaatctatagmccacaggccaaattct

SEQ ID NO: 2529 - DNA, 33 bp, homo sapiens
agagtgccactgcagaragtgttaggctgcctg

SEQ ID NO: 2530 - DNA, 33 bp, homo sapiens
ggtggaggccccgggaygttagtagttcggcac

SEQ ID NO: 2531 - DNA, 33 bp, homo sapiens
catggacatttttcatraaacagtctagtgtgt

SEQ ID NO: 2532 - DNA, 33 bp, homo sapiens
cggtctggaagatagakagcaaaacattgcaga

SEQ ID NO: 2533 - DNA, 33 bp, homo sapiens
gctagggatactggtayagataacagctatggt

SEQ ID NO: 2534 - DNA, 33 bp, homo sapiens
accataagcagatataycgacaaagaaaatctc

SEQ ID NO: 2535 - DNA, 33 bp, homo sapiens
gctaaatttaataaacraagagacgagagagag

SEQ ID NO: 2536 - DNA, 33 bp, homo sapiens
aacatatagaagggtakccagtgaaaaataact

SEQ ID NO: 2537 - DNA, 33 bp, homo sapiens
ctccagacagtactcckgccactactgaaccat

SEQ ID NO: 2538 - DNA, 33 bp, homo sapiens
ataatccaaaataataratatccataggtccat

SEQ ID NO: 2539 - DNA, 33 bp, homo sapiens
gcccaaagaaataccayaggagtcattaatttt

SEQ ID NO: 2540 - DNA, 33 bp, homo sapiens
ggtggctctccataagraggtgggtcctcagca

SEQ ID NO: 2541 - DNA, 33 bp, homo sapiens
caaagagtggcaccaaygtccctggtctcctcc

SEQ ID NO: 2542 - DNA, 33 bp, homo sapiens
gagacactccaaagccrcacattcccgcaagcc

SEQ ID NO: 2543 - DNA, 33 bp, homo sapiens
aaaacacccatggaacraggaacagacgtggga

SEQ ID NO: 2544 - DNA, 33 bp, homo sapiens
ttgcgaagttgcccacrggttttcctgaggagg

SEQ ID NO: 2545 - DNA, 33 bp, homo sapiens
caggagagaaaacgcaraggccgggcacatcgc

SEQ ID NO: 2546 - DNA, 33 bp, homo sapiens
ctttagcatttaattakgtgccacgtgggccct

SEQ ID NO: 2547 - DNA, 33 bp, homo sapiens
tttgctctcttaaccayggaccttgcacagtgt

SEQ ID NO: 2548 - DNA, 33 bp, homo sapiens
gccttgtttatcttccraatgacgggtctgggg

SEQ ID NO: 2549 - DNA, 33 bp, homo sapiens
cattttgctccttccasccaaaaagcaccccta

SEQ ID NO: 2550 - DNA, 33 bp, homo sapiens
tatgttgtaaccaggaygtcttaaatgattctt

SEQ ID NO: 2551 - DNA, 33 bp, homo sapiens
acaggttgtcaatctcyaaatgcaagttatttt

SEQ ID NO: 2552 - DNA, 33 bp, homo sapiens
gatctcaagttgcccaragaggaaggcaccata

SEQ ID NO: 2553 - DNA, 33 bp, homo sapiens
caagaatcctagaagcrgacctattatccacca

SEQ ID NO: 2554 - DNA, 33 bp, homo sapiens
ctctgtccatctatcartaacaaaatctccaag

SEQ ID NO: 2555 - DNA, 33 bp, homo sapiens
gcagagtggggtccacragacatcccagggagg

SEQ ID NO: 2556 - DNA, 33 bp, homo sapiens
aggtaggatgaggcacrgaagaggaagatatgg

SEQ ID NO: 2557 - DNA, 33 bp, homo sapiens
gtaaaaatattcatcaytgagaaaaaggacagc

SEQ ID NO: 2558 - DNA, 33 bp, homo sapiens
cttgtaacccggtagaragaatcatagccttga

SEQ ID NO: 2559 - DNA, 33 bp, homo sapiens
tagaatagagactgtcygaaggagcttacaatt

SEQ ID NO: 2560 - DNA, 33 bp, homo sapiens
ggctcaccaggatcctyagattccacattaggt

SEQ ID NO: 2561 - DNA, 33 bp, homo sapiens
gttatgtaagtatcacrccttcctatcacagga

SEQ ID NO: 2562 - DNA, 33 bp, homo sapiens
tcttaggaatcccatcscatattttccagttaa

SEQ ID NO: 2563 - DNA, 33 bp, homo sapiens
ttatttcctcatctacmgaattcagggcttgga

SEQ ID NO: 2564 - DNA, 33 bp, homo sapiens
aagtacctcaacatacyaaatgaggccgcatgg

SEQ ID NO: 2565 - DNA, 33 bp, homo sapiens
caaactagtaaggatcygacacaataagaattt

SEQ ID NO: 2566 - DNA, 33 bp, homo sapiens
tctgatagttactgaaygttctgcaatgcttta

SEQ ID NO: 2567 - DNA, 33 bp, homo sapiens
tctgacctctgcttgamcccaccactctttgct

SEQ ID NO: 2568 - DNA, 33 bp, homo sapiens
attattccttaaactcygacttatcaaagtaca

SEQ ID NO: 2569 - DNA, 33 bp, homo sapiens
gcagctgacaaaagtayaaaaattgtgccagcc

SEQ ID NO: 2570 - DNA, 33 bp, homo sapiens
caactggagcttaatascactggagaatcctag

SEQ ID NO: 2571 - DNA, 33 bp, homo sapiens
gaagactataaagcagwcacttgttctttggta

SEQ ID NO: 2572 - DNA, 33 bp, homo sapiens
ttgatctcaaaaatcaytccgagcctcaaaaaa

SEQ ID NO: 2573 - DNA, 33 bp, homo sapiens
ttgtagacatcaatacygtacaatagaaccttc

SEQ ID NO: 2574 - DNA, 33 bp, homo sapiens
agattagcaaacctatraatcataatttcttga

SEQ ID NO: 2575 - DNA, 33 bp, homo sapiens
tcatacaataggcccasaacagattaaggagtg

SEQ ID NO: 2576 - DNA, 33 bp, homo sapiens
taaattgttccagtccygactcaaagatggcaa

SEQ ID NO: 2577 - DNA, 33 bp, homo sapiens
gcattccttggttatargcacatcacaccaatg

SEQ ID NO: 2578 - DNA, 33 bp, homo sapiens
gaaaggacatgaaaacwgaataatttaatggtg

SEQ ID NO: 2579 - DNA, 33 bp, homo sapiens
taaaaacatggtacacrgaaaagtatgactgaa

SEQ ID NO: 2580 - DNA, 33 bp, homo sapiens
tgacacatactgaagasaaaagtcaatcaatcc

SEQ ID NO: 2581 - DNA, 33 bp, homo sapiens
tcaatgggtcccaagawgcatttctcactgtta

SEQ ID NO: 2582 - DNA, 33 bp, homo sapiens
atcattccaaagaaacrcaatcatcagattctc

SEQ ID NO: 2583 - DNA, 33 bp, homo sapiens
agtagattcataaatasaaaaccatatggcaac

SEQ ID NO: 2584 - DNA, 33 bp, homo sapiens
gtagctctttaaaaaaytgatcattgtccatca

SEQ ID NO: 2585 - DNA, 33 bp, homo sapiens
ttccaactcctgtgacyccgatggacacagcct

SEQ ID NO: 2586 - DNA, 33 bp, homo sapiens
attgttactactggagragaactgtgctaatcc

SEQ ID NO: 2587 - DNA, 33 bp, homo sapiens
ctacaatgattttagarctcgctgatacttttt

SEQ ID NO: 2588 - DNA, 33 bp, homo sapiens
tttggcagagtcaagcragcataaaatttaaag

SEQ ID NO: 2589 - DNA, 33 bp, homo sapiens
agaaactgagttaatawatgtgtgatgtgctca

SEQ ID NO: 2590 - DNA, 33 bp, homo sapiens
agctttgagttttagcyccttttctgcctcaat

SEQ ID NO: 2591 - DNA, 33 bp, homo sapiens
tgttggttctttcacayggctaatttaaagatc

SEQ ID NO: 2592 - DNA, 33 bp, homo sapiens
agtttatagactcatcraaaactgttcacaatg

SEQ ID NO: 2593 - DNA, 33 bp, homo sapiens
tcatagggctactgtamggattaaacacataaa

SEQ ID NO: 2594 - DNA, 33 bp, homo sapiens
tcccagctcttttaaaktaaagaaccaatcatg

SEQ ID NO: 2595 - DNA, 33 bp, homo sapiens
ctccactatagcaaagraaatgaccctgaggac

SEQ ID NO: 2596 - DNA, 33 bp, homo sapiens
ccaaacccagccttgasaatgattaatagtaaa

SEQ ID NO: 2597 - DNA, 33 bp, homo sapiens
aaagaagaaattatacygatgctgtacaatctc

SEQ ID NO: 2598 - DNA, 33 bp, homo sapiens
ttcccattggtgacaartatgatgaagaaccta

SEQ ID NO: 2599 - DNA, 33 bp, homo sapiens
ctggcaaagtacttgaygttttcattgaaactg

SEQ ID NO: 2600 - DNA, 33 bp, homo sapiens
atgtatctgacattccrctcagtgtagaagata

SEQ ID NO: 2601 - DNA, 33 bp, homo sapiens
cttttcatttgataacmaagtgcaacttgttat

SEQ ID NO: 2602 - DNA, 33 bp, homo sapiens
ccttttctctgcctcaygaagggtacctctgtc

SEQ ID NO: 2603 - DNA, 33 bp, homo sapiens
tgaactctttgtaaccrccctcatatgaacaat

SEQ ID NO: 2604 - DNA, 33 bp, homo sapiens
cagcagcaaaagaaatsatctagtgaaactttg

SEQ ID NO: 2605 - DNA, 33 bp, homo sapiens
accaaaaagtcagacartaacaggtgttagcaa

SEQ ID NO: 2606 - DNA, 33 bp, homo sapiens
acactcttaagaaaccrcatcaagtaatgggca

SEQ ID NO: 2607 - DNA, 33 bp, homo sapiens
gggattgagatggagayggctacattctatatt

SEQ ID NO: 2608 - DNA, 33 bp, homo sapiens
tttgtgttccagctgtyaacaattcactgctga

SEQ ID NO: 2609 - DNA, 33 bp, homo sapiens
agacagtctatccagcratcaccaaatatcatc

SEQ ID NO: 2610 - DNA, 33 bp, homo sapiens
cccatttattaagcgamagctgagggaaaatag

SEQ ID NO: 2611 - DNA, 33 bp, homo sapiens
tatatgtggagttagcrgaaaagagacagctat

SEQ ID NO: 2612 - DNA, 33 bp, homo sapiens
cagagctacccagccamactcaatctacgttaa

SEQ ID NO: 2613 - DNA, 33 bp, homo sapiens
atactctctagttttayggtaacctgaagcctg

SEQ ID NO: 2614 - DNA, 33 bp, homo sapiens
ctcccatgcacaaggaygctcgcctgctgactc

SEQ ID NO: 2615 - DNA, 33 bp, homo sapiens
agatagaactgttcacratcctgaaattttcat

SEQ ID NO: 2616 - DNA, 33 bp, homo sapiens
cattaaaatgaagacasctgaggaaataacaca

SEQ ID NO: 2617 - DNA, 33 bp, homo sapiens
tatcaacattcttctcragtggattatgtggta

SEQ ID NO: 2618 - DNA, 33 bp, homo sapiens
tcctctgcaatttatcyaatccactgtgtgcca

SEQ ID NO: 2619 - DNA, 33 bp, homo sapiens
cagttccagagagaccraaagagacctcagggg

SEQ ID NO: 2620 - DNA, 33 bp, homo sapiens
cctgagagtggaaaaartccctcttaaactcat

SEQ ID NO: 2621 - DNA, 33 bp, homo sapiens
agtttgtcaatcaatarccctgagaaaatgcta

SEQ ID NO: 2622 - DNA, 33 bp, homo sapiens
ttaaagtctaaaaagayagcttcgtcaggtggg

SEQ ID NO: 2623 - DNA, 33 bp, homo sapiens
actcaacccaagcaaakttgtcctagtgtgccc

SEQ ID NO: 2624 - DNA, 33 bp, homo sapiens
aatgtgctaggtgttaygctgggggacacagtg

SEQ ID NO: 2625 - DNA, 33 bp, homo sapiens
gtatcaataaagaaaamcttatcctgggccacg

SEQ ID NO: 2626 - DNA, 33 bp, homo sapiens
gatgtcacagagaaagmaagtcttagaactaga

SEQ ID NO: 2627 - DNA, 33 bp, homo sapiens
gaaggtagacacaaaaraatacttacattatga

SEQ ID NO: 2628 - DNA, 33 bp, homo sapiens
caggcaggaagtgctargggagaacacaccctg

SEQ ID NO: 2629 - DNA, 33 bp, homo sapiens
gttttccatttttttcrccattaagagcagtga

SEQ ID NO: 2630 - DNA, 33 bp, homo sapiens
aatcccagccaccaaaragacaatcaatagaaa

SEQ ID NO: 2631 - DNA, 33 bp, homo sapiens
acatcctcttcattgayagatttgtatatttcc

SEQ ID NO: 2632 - DNA, 33 bp, homo sapiens
ggaaaactacctcttcrcatggtgcatttctct

SEQ ID NO: 2633 - DNA, 33 bp, homo sapiens
atcaatgggaaaaaaaygcacatctagatgcag

SEQ ID NO: 2634 - DNA, 33 bp, homo sapiens
ctgggtctcgatggatsagtaggaattcaccag

SEQ ID NO: 2635 - DNA, 33 bp, homo sapiens
tttctaaacagagctawcatcagagttgtctga

SEQ ID NO: 2636 - DNA, 33 bp, homo sapiens
ttattctcaagacaaaytgatgagatggagtag

SEQ ID NO: 2637 - DNA, 33 bp, homo sapiens
gaacaacactcctttarcctgttcctcttccat

SEQ ID NO: 2638 - DNA, 33 bp, homo sapiens
gactgctgttggaacayatcggttgtatcttca

SEQ ID NO: 2639 - DNA, 33 bp, homo sapiens
tttatctgtctatcgayctctctttctttctct

SEQ ID NO: 2640 - DNA, 33 bp, homo sapiens
agtgtgggttattcagragtggacttgagatac

SEQ ID NO: 2641 - DNA, 33 bp, homo sapiens
ctatgatggtcaaacayatataaaagtatgaat

SEQ ID NO: 2642 - DNA, 33 bp, homo sapiens
agcaggactccaacccrcctaatcacaactcca

SEQ ID NO: 2643 - DNA, 33 bp, homo sapiens
atttgctgtagagatayctgtgttgttgttttt

SEQ ID NO: 2644 - DNA, 33 bp, homo sapiens
gtgaaggtgggtcaggwccatagatttcttaga

SEQ ID NO: 2645 - DNA, 33 bp, homo sapiens
gcataatgtattaaagycttgaagtatttagtc

SEQ ID NO: 2646 - DNA, 33 bp, homo sapiens
aacactaaaatcagaaratcatctactaccaaa

SEQ ID NO: 2647 - DNA, 33 bp, homo sapiens
gtaggagtttggtttaygcacacactctgaaat

SEQ ID NO: 2648 - DNA, 33 bp, homo sapiens
tctttctgtgagaatgratacgcttatacacgt

SEQ ID NO: 2649 - DNA, 33 bp, homo sapiens
aaatacactggagttcraaagaccacatgaatc

SEQ ID NO: 2650 - DNA, 33 bp, homo sapiens
tttaagaattgtatcawcttgaagtagtgtgaa

SEQ ID NO: 2651 - DNA, 33 bp, homo sapiens
ggtacccgtaagtgacrgcatcaagtgccaccg

SEQ ID NO: 2652 - DNA, 33 bp, homo sapiens
ctaaatgcaaaagcgayccatgctctagagcag

SEQ ID NO: 2653 - DNA, 33 bp, homo sapiens
aacttcagtagagataygtaagtaaagaggact

SEQ ID NO: 2654 - DNA, 33 bp, homo sapiens
cacataagatggctcamatatgcagctttctac

SEQ ID NO: 2655 - DNA, 33 bp, homo sapiens
atggtatgtagctaacraagcaacattgtgcta

SEQ ID NO: 2656 - DNA, 33 bp, homo sapiens
ctgccactatgacctcyaacgaatgaggcttct

SEQ ID NO: 2657 - DNA, 33 bp, homo sapiens
ctgaggtagatcttgamagctacaggtattact

SEQ ID NO: 2658 - DNA, 33 bp, homo sapiens
gtaggaaagacttaaawgtgtgaaacaggccag

SEQ ID NO: 2659 - DNA, 33 bp, homo sapiens
gcctcctgggtttatgyaagaagctcaagtcta

SEQ ID NO: 2660 - DNA, 33 bp, homo sapiens
taaggacctggtttacyatctgagaactttagt

SEQ ID NO: 2661 - DNA, 33 bp, homo sapiens
tgttcccttgttcaaaytgaggccaatccaaag

SEQ ID NO: 2662 - DNA, 33 bp, homo sapiens
taagagaggtgataccrcttgcccagcatggta

SEQ ID NO: 2663 - DNA, 33 bp, homo sapiens
tcattccatcattaagkattgcattgcacgtaa

SEQ ID NO: 2664 - DNA, 33 bp, homo sapiens
atgctggagagaaagaytcggcctcaggggttc

SEQ ID NO: 2665 - DNA, 33 bp, homo sapiens
aggcccaagttccaacygcaatgccagcactgt

SEQ ID NO: 2666 - DNA, 33 bp, homo sapiens
aacttgccgttcaacargctttcatttttaaaa

SEQ ID NO: 2667 - DNA, 33 bp, homo sapiens
tttttatcacaaaagaktcatgcaaaacagaaa

SEQ ID NO: 2668 - DNA, 33 bp, homo sapiens
ttcctctctcttctagraacattcctgagtggg

SEQ ID NO: 2669 - DNA, 33 bp, homo sapiens
agtagataccaggatartaaacaggcacacaaa

SEQ ID NO: 2670 - DNA, 33 bp, homo sapiens
ttccctgcccagttctracattgtgaccagtgg

SEQ ID NO: 2671 - DNA, 33 bp, homo sapiens
ttgagaatcacctgggragctatgaaatatgca

SEQ ID NO: 2672 - DNA, 33 bp, homo sapiens
gctgaggagaaagttcrcagacacaaatagcaa

SEQ ID NO: 2673 - DNA, 33 bp, homo sapiens
ctaaagcaagttgcagyccagtagagatccaag

SEQ ID NO: 2674 - DNA, 33 bp, homo sapiens
aaaactttggctgtgamctgaaaactataaaaa

SEQ ID NO: 2675 - DNA, 33 bp, homo sapiens
tcagaaatcttggacarcccattgctgctaaca

SEQ ID NO: 2676 - DNA, 33 bp, homo sapiens
caagagaatttgttggytcatataatggtaaag

SEQ ID NO: 2677 - DNA, 33 bp, homo sapiens
atgttctgacaatcaamattctgaaaataagta

SEQ ID NO: 2678 - DNA, 33 bp, homo sapiens
ccactgccctgaacaayggtcctgagtaaacac

SEQ ID NO: 2679 - DNA, 33 bp, homo sapiens
ccctttgttgagatgasaaaactgaagtcaagg

SEQ ID NO: 2680 - DNA, 33 bp, homo sapiens
ttctactttttaaatgwaagtgtctatagtggt

SEQ ID NO: 2681 - DNA, 33 bp, homo sapiens
agagtaagtaggacaaygccacataaaaagagg

SEQ ID NO: 2682 - DNA, 33 bp, homo sapiens
ggcactttggtgagacyggcaatgaagtaggag

SEQ ID NO: 2683 - DNA, 33 bp, homo sapiens
taagatgtcaagatgcmatgattcgtgtaagtt

SEQ ID NO: 2684 - DNA, 33 bp, homo sapiens
attcattgagcagctaygtcccaagccctattg

SEQ ID NO: 2685 - DNA, 33 bp, homo sapiens
tgcttacaccatcaaaraaacatattgtaatat

SEQ ID NO: 2686 - DNA, 33 bp, homo sapiens
ctcaaccctctatcctragctgacttcattcaa

SEQ ID NO: 2687 - DNA, 33 bp, homo sapiens
tcttcaaagagcatcaracagttttggagaaac

SEQ ID NO: 2688 - DNA, 33 bp, homo sapiens
aaactcttctgtagaawcagattatggtcagtg

SEQ ID NO: 2689 - DNA, 33 bp, homo sapiens
gagtgataggtccaccrcaggcatgtcccctga

SEQ ID NO: 2690 - DNA, 33 bp, homo sapiens
ggccaaaagagtgtcaratgaccagccctactt

SEQ ID NO: 2691 - DNA, 33 bp, homo sapiens
gaagagcgtttgcacaraggtatatgccagtat

SEQ ID NO: 2692 - DNA, 33 bp, homo sapiens
gaaagaaatctcaatgwattacaaatggaaaaa

SEQ ID NO: 2693 - DNA, 33 bp, homo sapiens
tcaagccaagaaagacrggccttaatagtgatg

SEQ ID NO: 2694 - DNA, 33 bp, homo sapiens
ctctttgttgattgtamcctttggcacactgtt

SEQ ID NO: 2695 - DNA, 33 bp, homo sapiens
tcattgtggtcaaaagyagtttttggtttaggg

SEQ ID NO: 2696 - DNA, 33 bp, homo sapiens
cagaatgttccctagcrcttcttcccagtcagt

SEQ ID NO: 2697 - DNA, 33 bp, homo sapiens
ccacccattaccaagcygatttctgataccagc

SEQ ID NO: 2698 - DNA, 33 bp, homo sapiens
gggctcctctgggagawgttgtagtggcttgga

SEQ ID NO: 2699 - DNA, 33 bp, homo sapiens
tcagaccataaaatgtyaaatagacttgaaata

SEQ ID NO: 2700 - DNA, 33 bp, homo sapiens
acccgaagaagccctayggatagtacaaatgtc

SEQ ID NO: 2701 - DNA, 33 bp, homo sapiens
ggggcttgacctgtgargagaagttgaggctca

SEQ ID NO: 2702 - DNA, 33 bp, homo sapiens
acaaaagcccacagtargctgttatatttatga

SEQ ID NO: 2703 - DNA, 33 bp, homo sapiens
ttttaaaatgcagaatwaaaaaacagctctagg

SEQ ID NO: 2704 - DNA, 33 bp, homo sapiens
ccatgttcctagcagasctcttcatgacctggt

SEQ ID NO: 2705 - DNA, 33 bp, homo sapiens
gaaaatgctgggtcacrggcaaagtatctccac

SEQ ID NO: 2706 - DNA, 33 bp, homo sapiens
ttgtcaagaatccacamgtcagtagttagactg

SEQ ID NO: 2707 - DNA, 33 bp, homo sapiens
acggatgatgaaaccawtggacaaacaaccagc

SEQ ID NO: 2708 - DNA, 33 bp, homo sapiens
aggttccaatgcctggmagtagaagagagtgag

SEQ ID NO: 2709 - DNA, 33 bp, homo sapiens
catcattaatgtgaackcgagcaaataaaagaa

SEQ ID NO: 2710 - DNA, 33 bp, homo sapiens
attacaaaaagcctccsaaagaaagcagaggct

SEQ ID NO: 2711 - DNA, 33 bp, homo sapiens
catatggacttccaccyggtgctggagtcccta

SEQ ID NO: 2712 - DNA, 33 bp, homo sapiens
ggcttccctgaagtcaygtcattttgtcagtgc

SEQ ID NO: 2713 - DNA, 33 bp, homo sapiens
ctctgcttcacttagaratgagacagaagaccc

SEQ ID NO: 2714 - DNA, 33 bp, homo sapiens
agaagtagcgacctgargaaatggaataattct

SEQ ID NO: 2715 - DNA, 33 bp, homo sapiens
tcagcaactttaagccyactggtttggagatct

SEQ ID NO: 2716 - DNA, 33 bp, homo sapiens
ttgggtttcattagccrctaatagcacagggac

SEQ ID NO: 2717 - DNA, 33 bp, homo sapiens
cattatgcttttaagascatttaagaccaagtt

SEQ ID NO: 2718 - DNA, 33 bp, homo sapiens
attttagagattcaaamggcacagttagcacaa

SEQ ID NO: 2719 - DNA, 33 bp, homo sapiens
ccaggtctgttggagarggaaacttactaacct

SEQ ID NO: 2720 - DNA, 33 bp, homo sapiens
gtaagtgtgcttcagaraatggaaatgatatga

SEQ ID NO: 2721 - DNA, 33 bp, homo sapiens
taaaatcttctgcaaartggatctgcagtgtgg

SEQ ID NO: 2722 - DNA, 33 bp, homo sapiens
gctaagtcaatctacamatcaggttcatggttc

SEQ ID NO: 2723 - DNA, 33 bp, homo sapiens
tttggaaatagcttcayggattttcccagccta

SEQ ID NO: 2724 - DNA, 33 bp, homo sapiens
aaagcctgaatgtcacygccttaagtgaggacc

SEQ ID NO: 2725 - DNA, 33 bp, homo sapiens
actggaatatgtcttakacccagattcagtctt

SEQ ID NO: 2726 - DNA, 33 bp, homo sapiens
aaattattattgtcgcyctcttcattaagaatt

SEQ ID NO: 2727 - DNA, 33 bp, homo sapiens
tgcacaggtccactaakacacagattggaaaat

SEQ ID NO: 2728 - DNA, 33 bp, homo sapiens
gtttgccagctcagaamaaaacaagaaagctac

SEQ ID NO: 2729 - DNA, 33 bp, homo sapiens
ctgagtagcctcttgargtcaccccgttttgct

SEQ ID NO: 2730 - DNA, 33 bp, homo sapiens
ggggtccaggagagctmagagaatgggtttcaa

SEQ ID NO: 2731 - DNA, 33 bp, homo sapiens
ctaacctataaattaarcctgatcctgtaggcc

SEQ ID NO: 2732 - DNA, 33 bp, homo sapiens
tttcaagagcaaacacyggctatgggacccaag

SEQ ID NO: 2733 - DNA, 33 bp, homo sapiens
tttagtctgaacagaaytgaagcacacatctca

SEQ ID NO: 2734 - DNA, 33 bp, homo sapiens
tgcaaggtagtttcccmaagaacaatcagaatc

SEQ ID NO: 2735 - DNA, 33 bp, homo sapiens
aggagagaactaaaacratgttcaagatgaaga

SEQ ID NO: 2736 - DNA, 33 bp, homo sapiens
atccgttcagggaggcygattcacaggagtcca

SEQ ID NO: 2737 - DNA, 33 bp, homo sapiens
tgcccagccatatctcyataactttaaggggta

SEQ ID NO: 2738 - DNA, 33 bp, homo sapiens
aatctgataagctgatragaacaggattggttg

SEQ ID NO: 2739 - DNA, 33 bp, homo sapiens
tggctggtttcgctgaygtttactgagctgctt

SEQ ID NO: 2740 - DNA, 33 bp, homo sapiens
ctctaatttttcattcragtcctatattcaaaa

SEQ ID NO: 2741 - DNA, 33 bp, homo sapiens
gggagcgatgctcagasggagaagccttccagg

SEQ ID NO: 2742 - DNA, 33 bp, homo sapiens
agttgctattacagtasgaatcagttactattt

SEQ ID NO: 2743 - DNA, 33 bp, homo sapiens
tttcagggaggggctaycatttttgtttcaaaa

SEQ ID NO: 2744 - DNA, 33 bp, homo sapiens
gtgctgatggagggaaygtccacagaatgattc

SEQ ID NO: 2745 - DNA, 33 bp, homo sapiens
ttgtacttgctgaaaayccaggagtgttctaat

SEQ ID NO: 2746 - DNA, 33 bp, homo sapiens
tatagacatcctttaaygtaaacactaaggtcc

SEQ ID NO: 2747 - DNA, 33 bp, homo sapiens
atcacttgagaaaccayatccactcgaagaaaa

SEQ ID NO: 2748 - DNA, 33 bp, homo sapiens
attattttgcacaccaragtagaagctcccaaa

SEQ ID NO: 2749 - DNA, 33 bp, homo sapiens
tgcctgaggcctcaccratagagctgcgatttg

SEQ ID NO: 2750 - DNA, 33 bp, homo sapiens
atccagaagacagaaayatgactccagccaaat

SEQ ID NO: 2751 - DNA, 33 bp, homo sapiens
gcttagtgtatagaaarcattcagaaaacattt

SEQ ID NO: 2752 - DNA, 33 bp, homo sapiens
cagttttcttgcattamcaccttagtatgcttt

SEQ ID NO: 2753 - DNA, 33 bp, homo sapiens
cttcttactttctcacygcatatgaacataatt

SEQ ID NO: 2754 - DNA, 33 bp, homo sapiens
ttgcactgggaattacrgaactaatgccaatcc

SEQ ID NO: 2755 - DNA, 33 bp, homo sapiens
ggggctggtatcaagargaagatggctaagggt

SEQ ID NO: 2756 - DNA, 33 bp, homo sapiens
gtgttcagctgcactgyaggtaaagttggtggt

SEQ ID NO: 2757 - DNA, 33 bp, homo sapiens
agactggtagagagtayctcacaaaggcagacc

SEQ ID NO: 2758 - DNA, 33 bp, homo sapiens
ccctgtctcaaaaattsaaagaaatcatttcac

SEQ ID NO: 2759 - DNA, 33 bp, homo sapiens
tctcatctgtaaaatasggaaataatgggaaac

SEQ ID NO: 2760 - DNA, 33 bp, homo sapiens
gaacataagggctcctwaaaggctagcccaatg

SEQ ID NO: 2761 - DNA, 33 bp, homo sapiens
aaaacagtggattttaratgttctcaccacaaa

SEQ ID NO: 2762 - DNA, 33 bp, homo sapiens
cctttctaacttgctcsctttcattccatcctg

SEQ ID NO: 2763 - DNA, 33 bp, homo sapiens
gtctgggtaagaagccracccacgaaatggttc

SEQ ID NO: 2764 - DNA, 33 bp, homo sapiens
ctgaggcagtccagatwagtcaggagaaagcat

SEQ ID NO: 2765 - DNA, 33 bp, homo sapiens
ccagctatgtccctccygatgatgtaaaaatct

SEQ ID NO: 2766 - DNA, 33 bp, homo sapiens
cttgctagctggtccaygagttacataatgatg

SEQ ID NO: 2767 - DNA, 33 bp, homo sapiens
aaaagattttttaatgscataacaccgaagtca

SEQ ID NO: 2768 - DNA, 33 bp, homo sapiens
tgccatgcagaaaagcrcaataaatgttaactg

SEQ ID NO: 2769 - DNA, 33 bp, homo sapiens
ggttgaaatgaaataargatgtgagatcaatgg

SEQ ID NO: 2770 - DNA, 33 bp, homo sapiens
tctgtcttaaaagagawcattgaactaagaatg

SEQ ID NO: 2771 - DNA, 33 bp, homo sapiens
gagcagctacataggayacagaagtagtaaaca

SEQ ID NO: 2772 - DNA, 33 bp, homo sapiens
caaaatctgtctacacygggtttaatcagacac

SEQ ID NO: 2773 - DNA, 33 bp, homo sapiens
acaagaacccaaagaaygaatgctttttagcaa

SEQ ID NO: 2774 - DNA, 33 bp, homo sapiens
gtggattatgttaagamaatttgccagaaatac

SEQ ID NO: 2775 - DNA, 33 bp, homo sapiens
ctaataaaatcaggtgmcaagtttcccttctcc

SEQ ID NO: 2776 - DNA, 33 bp, homo sapiens
cagagggtaatcacatsatctgttcaccatatt

SEQ ID NO: 2777 - DNA, 33 bp, homo sapiens
ttttgtaactattcaawgagttgtgatatataa

SEQ ID NO: 2778 - DNA, 33 bp, homo sapiens
ttgccaaaatcatgtgraagaaaacttaagaaa

SEQ ID NO: 2779 - DNA, 33 bp, homo sapiens
aaagtagtccaaacacrcttcaatgaggacagt

SEQ ID NO: 2780 - DNA, 33 bp, homo sapiens
aaccgactgtaaactcsactcactttagactac

SEQ ID NO: 2781 - DNA, 33 bp, homo sapiens
tgggagattcttcatayagtgaggctgttttaa

SEQ ID NO: 2782 - DNA, 33 bp, homo sapiens
ctgatgctcggttccayagagaacataaactct

SEQ ID NO: 2783 - DNA, 33 bp, homo sapiens
cctgttccacagtaccrccactttgaaagtgaa

SEQ ID NO: 2784 - DNA, 33 bp, homo sapiens
tgagtaccatagtgaawaacacatcccagttct

SEQ ID NO: 2785 - DNA, 33 bp, homo sapiens
gcaaatgaaaactctawattcctgtaggcacta

SEQ ID NO: 2786 - DNA, 33 bp, homo sapiens
atgttgctttcgtctawcattgaattttctgga

SEQ ID NO: 2787 - DNA, 33 bp, homo sapiens
gagtcctcattaaaaamaagtcatagtttccct

SEQ ID NO: 2788 - DNA, 33 bp, homo sapiens
cactaacctatttgaartaaatacacaggcaca

SEQ ID NO: 2789 - DNA, 33 bp, homo sapiens
aagatagctcagagcaktctccatttttaaagt

SEQ ID NO: 2790 - DNA, 33 bp, homo sapiens
tcacagaactcctagamgcgaagtgtttttatt

SEQ ID NO: 2791 - DNA, 33 bp, homo sapiens
tggtttgtatttaggaycgtgttgtacaaaaat

SEQ ID NO: 2792 - DNA, 33 bp, homo sapiens
aagaaatcagtacatamgaacatttgcataccc

SEQ ID NO: 2793 - DNA, 33 bp, homo sapiens
ccattctagaggcgaartaaagcctatcttgtt

SEQ ID NO: 2794 - DNA, 33 bp, homo sapiens
gtgcggaaggtcaaacygctggtattttgcagt

SEQ ID NO: 2795 - DNA, 33 bp, homo sapiens
taacttctatagcaatwacttcagattccttgt

SEQ ID NO: 2796 - DNA, 33 bp, homo sapiens
agagataaataagtaaygtttgaaatcctcgat

SEQ ID NO: 2797 - DNA, 33 bp, homo sapiens
gtaataagcacataaaytgtaatgatctagcaa

SEQ ID NO: 2798 - DNA, 33 bp, homo sapiens
tatcttcctgtgcacartgcttatctagaccct

SEQ ID NO: 2799 - DNA, 33 bp, homo sapiens
cagctctgctcatctgyaaccggataactgcta

SEQ ID NO: 2800 - DNA, 33 bp, homo sapiens
aaatgtaatcagtgaasagaaagcctggttcat

SEQ ID NO: 2801 - DNA, 33 bp, homo sapiens
ggaagaatagaggaacraaaaagacatgagccc

SEQ ID NO: 2802 - DNA, 33 bp, homo sapiens
gaacccaattgttggcyctggtaggaagaataa

SEQ ID NO: 2803 - DNA, 33 bp, homo sapiens
ccaaacaatgtaccccyctccagagcaagctgg

SEQ ID NO: 2804 - DNA, 33 bp, homo sapiens
gatccaaacacttagayggctacaaaactaatt

SEQ ID NO: 2805 - DNA, 33 bp, homo sapiens
gattatgcaggattaasaaaaaaactgtgttta

SEQ ID NO: 2806 - DNA, 33 bp, homo sapiens
atacaatgcactcctaycctgtaagctgcttta

SEQ ID NO: 2807 - DNA, 33 bp, homo sapiens
aacattatgaggagtasaaaaacaaatcaaaag

SEQ ID NO: 2808 - DNA, 33 bp, homo sapiens
tagcaacgaattcttasgcttttgatttgtttt

SEQ ID NO: 2809 - DNA, 33 bp, homo sapiens
aagaattcgttgctagmcatgaaagtcctctgt

SEQ ID NO: 2810 - DNA, 33 bp, homo sapiens
tgagacactttgaaaayggacaccagacttcac

SEQ ID NO: 2811 - DNA, 33 bp, homo sapiens
tgcctgttagtggaaamaaagaatgtgccatgg

SEQ ID NO: 2812 - DNA, 33 bp, homo sapiens
agttaacaacacagccraactgctcttgctccg

SEQ ID NO: 2813 - DNA, 33 bp, homo sapiens
ttcgctctcctcatcargttcctggtataggga

SEQ ID NO: 2814 - DNA, 33 bp, homo sapiens
ggccagtgcccttaaarttctgccaggagagcc

SEQ ID NO: 2815 - DNA, 33 bp, homo sapiens
ccatccagaacattcaragtaaaaacttgagct

SEQ ID NO: 2816 - DNA, 33 bp, homo sapiens
aatatgatatatcaccmattaaaattctccaat

SEQ ID NO: 2817 - DNA, 33 bp, homo sapiens
ttgagcagtctgtcaarcaatacctggtgaaaa

SEQ ID NO: 2818 - DNA, 33 bp, homo sapiens
cttccctcgtcccctcyaaacatccactttcct

SEQ ID NO: 2819 - DNA, 33 bp, homo sapiens
gttgtctggttagaaayatagcaaaaggagagt

SEQ ID NO: 2820 - DNA, 33 bp, homo sapiens
agggagcaatgagcccscaacagaaataagctg

SEQ ID NO: 2821 - DNA, 33 bp, homo sapiens
ttctaacaaaagtttcrcatatctagagctgaa

SEQ ID NO: 2822 - DNA, 33 bp, homo sapiens
acttcatagttaacaaytgctttcaaggaatgc

SEQ ID NO: 2823 - DNA, 33 bp, homo sapiens
aatatcttatctctcarcctctggcaagctcca

SEQ ID NO: 2824 - DNA, 33 bp, homo sapiens
agctacctgactctaayggcagctacttttaag

SEQ ID NO: 2825 - DNA, 33 bp, homo sapiens
tctcaagcattttgaaycaggatacctcttttc

SEQ ID NO: 2826 - DNA, 33 bp, homo sapiens
gtatgactatacatcartgactcacacggtggg

SEQ ID NO: 2827 - DNA, 33 bp, homo sapiens
atcgcatattaaaaaamctttagctaagcagga

SEQ ID NO: 2828 - DNA, 33 bp, homo sapiens
tcacagataaccaagcrgcaaggtgtttaatat

SEQ ID NO: 2829 - DNA, 33 bp, homo sapiens
aagtgctagtacccaasctttcattttgtaatg

SEQ ID NO: 2830 - DNA, 33 bp, homo sapiens
aaatattattcatgackagttcaaggtagctgc

SEQ ID NO: 2831 - DNA, 33 bp, homo sapiens
ctgatggccagtctaartatcctttcgagaatg

SEQ ID NO: 2832 - DNA, 33 bp, homo sapiens
tgtataaatgtgtttarcatagcacctagcact

SEQ ID NO: 2833 - DNA, 33 bp, homo sapiens
agtgtggggcacttcarctttatctgcttcata

SEQ ID NO: 2834 - DNA, 33 bp, homo sapiens
caacaaaggaaaatccsaatgctttcctttgcc

SEQ ID NO: 2835 - DNA, 33 bp, homo sapiens
tcatgatagaatacacyggacttgcattattca

SEQ ID NO: 2836 - DNA, 33 bp, homo sapiens
ctactctcaccctcatragaaaacgaactctgt

SEQ ID NO: 2837 - DNA, 33 bp, homo sapiens
tatgcatgtatagtcaytcccaaacatcatgct

SEQ ID NO: 2838 - DNA, 33 bp, homo sapiens
tttgaagcccaaggtcraaactcatatctttta

SEQ ID NO: 2839 - DNA, 33 bp, homo sapiens
actgtttcttcagtaakgttgtctgcacttcta

SEQ ID NO: 2840 - DNA, 33 bp, homo sapiens
tctggtgcctgtagaayggttaactttaacatt

SEQ ID NO: 2841 - DNA, 33 bp, homo sapiens
aaataccaacattttcycattgatacttatttt

SEQ ID NO: 2842 - DNA, 33 bp, homo sapiens
gtctttgccaaaggaayaccgcttcagggcctg

SEQ ID NO: 2843 - DNA, 33 bp, homo sapiens
acttgcaagtgtcagayaataatctacaaggtg

SEQ ID NO: 2844 - DNA, 33 bp, homo sapiens
atgcactaaccttctckcttctcaacattaaaa

SEQ ID NO: 2845 - DNA, 33 bp, homo sapiens
atgacctaggcactgawctaaaagctttatgtc

SEQ ID NO: 2846 - DNA, 33 bp, homo sapiens
tcaactcagttaatacwgccaacaactctttga

SEQ ID NO: 2847 - DNA, 33 bp, homo sapiens
attggagtatttcccaygtgtttgctaaaggga

SEQ ID NO: 2848 - DNA, 33 bp, homo sapiens
ccccacatattataaawgggaactcagctgtat

SEQ ID NO: 2849 - DNA, 33 bp, homo sapiens
ggttttgcctgggtacyatgtaggcctttgacc

SEQ ID NO: 2850 - DNA, 33 bp, homo sapiens
tgacctcatgagagacrcttttccactggggcc

SEQ ID NO: 2851 - DNA, 33 bp, homo sapiens
gctgcactccctctcaragctccagtggagaat

SEQ ID NO: 2852 - DNA, 33 bp, homo sapiens
catgtctctggaaggcrccctcaagcttatgat

SEQ ID NO: 2853 - DNA, 33 bp, homo sapiens
ttacttacagagcaaartataattcactaaaat

SEQ ID NO: 2854 - DNA, 33 bp, homo sapiens
ttagttaagacgattaygttcagaacacaccgc

SEQ ID NO: 2855 - DNA, 33 bp, homo sapiens
caggaggtagagagcargaaatatttggccatc

SEQ ID NO: 2856 - DNA, 33 bp, homo sapiens
caattctggttggaaayatgttgaacatccaag

SEQ ID NO: 2857 - DNA, 33 bp, homo sapiens
atgacgagacgatgccrgcaatgctgagatcaa

SEQ ID NO: 2858 - DNA, 33 bp, homo sapiens
gatggtttgtcttgccrcagtagatcattaaaa

SEQ ID NO: 2859 - DNA, 33 bp, homo sapiens
gttgtcacagatatttwaaagtaacattttaca

SEQ ID NO: 2860 - DNA, 33 bp, homo sapiens
cagtagcagtactctcyacctccccttcatgtc

SEQ ID NO: 2861 - DNA, 33 bp, homo sapiens
taactaatctagtacarctttttaactggctgt

SEQ ID NO: 2862 - DNA, 33 bp, homo sapiens
ctctgagcaacataagrcatcagaaaggaaact

SEQ ID NO: 2863 - DNA, 33 bp, homo sapiens
gtttgaaggcaatgtayccagttgaaaaccagg

SEQ ID NO: 2864 - DNA, 33 bp, homo sapiens
ctttgatatgtttacarccttgactattaaaaa

SEQ ID NO: 2865 - DNA, 33 bp, homo sapiens
agctaccagggcattaygaacgaaaaacataat

SEQ ID NO: 2866 - DNA, 33 bp, homo sapiens
tttcatatttctcctcygacttcacaaggcaga

SEQ ID NO: 2867 - DNA, 33 bp, homo sapiens
atttcatagatcaccaragaagccctagttatc

SEQ ID NO: 2868 - DNA, 33 bp, homo sapiens
agatccatgaaatcaaygctaagaaatctgggc

SEQ ID NO: 2869 - DNA, 33 bp, homo sapiens
tgaagacttttatacaycagaaatggtccatgt

SEQ ID NO: 2870 - DNA, 33 bp, homo sapiens
gaggccttttgttctayagagatggtgttacat

SEQ ID NO: 2871 - DNA, 33 bp, homo sapiens
cttatgttatatttcaraatgttgaagtgaagg

SEQ ID NO: 2872 - DNA, 33 bp, homo sapiens
ctttccatgtttgtgayagatctttctccattc

SEQ ID NO: 2873 - DNA, 33 bp, homo sapiens
ctcatttctataaggcrcagatttctagtagct

SEQ ID NO: 2874 - DNA, 33 bp, homo sapiens
tggataaagagaagaaygaaaacatggatgagg

SEQ ID NO: 2875 - DNA, 33 bp, homo sapiens
agtgatcttatgtgtaycattcaagtattctaa

SEQ ID NO: 2876 - DNA, 33 bp, homo sapiens
tgcaaactacatcacayaggtatagccttctag

SEQ ID NO: 2877 - DNA, 33 bp, homo sapiens
gtgtagtgctataaacragctccataagtgcag

SEQ ID NO: 2878 - DNA, 33 bp, homo sapiens
aaaatgagatatcaagscaaactatgcattttt

SEQ ID NO: 2879 - DNA, 33 bp, homo sapiens
ctaattttgtctgtgamccctctcaacttctca

SEQ ID NO: 2880 - DNA, 33 bp, homo sapiens
aggagctgaatcattaraagtcttcaagtcctt

SEQ ID NO: 2881 - DNA, 33 bp, homo sapiens
taactttttcagttcamacttttctgaggccat

SEQ ID NO: 2882 - DNA, 33 bp, homo sapiens
tgtagtctttcacaccragagagatttctaagt

SEQ ID NO: 2883 - DNA, 33 bp, homo sapiens
aatgccaaaaggtagaygacacattacaaaatt

SEQ ID NO: 2884 - DNA, 33 bp, homo sapiens
aaaatgagcataacgaygtcaggctaatcttaa

SEQ ID NO: 2885 - DNA, 33 bp, homo sapiens
cagagcatgaaaccaargctctcgaggaacacc

SEQ ID NO: 2886 - DNA, 33 bp, homo sapiens
tttcttatacgtggaargtaaatattgtgcaca

SEQ ID NO: 2887 - DNA, 33 bp, homo sapiens
gtgaagtcttcatatasagacagtaaaattctt

SEQ ID NO: 2888 - DNA, 33 bp, homo sapiens
acaacataccttctcarggagttacttcttagt

SEQ ID NO: 2889 - DNA, 33 bp, homo sapiens
gctaagcaggttaaaakaattttttgcatctat

SEQ ID NO: 2890 - DNA, 33 bp, homo sapiens
actggacatagctctcraatagaggatatacat

SEQ ID NO: 2891 - DNA, 33 bp, homo sapiens
aaatatatggaaacaarctatatgatttgatat

SEQ ID NO: 2892 - DNA, 33 bp, homo sapiens
gaaaggacctttaggaygtgatgaaaattaaat

SEQ ID NO: 2893 - DNA, 33 bp, homo sapiens
ctgttttcaacacatamatcctgatggaatatt

SEQ ID NO: 2894 - DNA, 33 bp, homo sapiens
taataatggaaaactgyatttgaacttgcaggc

SEQ ID NO: 2895 - DNA, 33 bp, homo sapiens
cgtactttatcactaascaaccatttcctccag

SEQ ID NO: 2896 - DNA, 33 bp, homo sapiens
aagcttttggccagackgtagagcaatgtggca

SEQ ID NO: 2897 - DNA, 33 bp, homo sapiens
gtcaatgcatactacayagtttggtgaacctcg

SEQ ID NO: 2898 - DNA, 33 bp, homo sapiens
tgaatgctaattgacarctgattcataattagt

SEQ ID NO: 2899 - DNA, 33 bp, homo sapiens
ttaatttagaactcagwatgcttcaaaaagatc

SEQ ID NO: 2900 - DNA, 33 bp, homo sapiens
agttaagatgaagactragccgctataataaaa

SEQ ID NO: 2901 - DNA, 33 bp, homo sapiens
tttttttgggacattamatttcatagattggct

SEQ ID NO: 2902 - DNA, 33 bp, homo sapiens
caagcaaattggttcargagactgtgtttttct

SEQ ID NO: 2903 - DNA, 33 bp, homo sapiens
gctgcatggagagccaractaataactcagatt

SEQ ID NO: 2904 - DNA, 33 bp, homo sapiens
atagatattagaaaccragagaacatcaagtag

SEQ ID NO: 2905 - DNA, 33 bp, homo sapiens
attatcaaaaattatgyaacaggagtgcagtat

SEQ ID NO: 2906 - DNA, 33 bp, homo sapiens
attttcatgaatttagsagtctgtcttagctat

SEQ ID NO: 2907 - DNA, 33 bp, homo sapiens
agaatcactaagaggcratatgaaaggtaaggg

SEQ ID NO: 2908 - DNA, 33 bp, homo sapiens
aattaaacgaagaatgraagatggcatatatat

SEQ ID NO: 2909 - DNA, 33 bp, homo sapiens
aatgaaagtcaggatawaattgatgtcttccta

SEQ ID NO: 2910 - DNA, 33 bp, homo sapiens
ttcgccatgataaccargctggccttgaactcc

SEQ ID NO: 2911 - DNA, 33 bp, homo sapiens
tggatactgtggaagcmaaattgatatttcacc

SEQ ID NO: 2912 - DNA, 33 bp, homo sapiens
gaggggaagacaatgawgttatgtttcacctac

SEQ ID NO: 2913 - DNA, 33 bp, homo sapiens
tattttaatgataaagraaacaatgacaccaac

SEQ ID NO: 2914 - DNA, 33 bp, homo sapiens
tttgtcagtaattaaargtatctacaattatat

SEQ ID NO: 2915 - DNA, 33 bp, homo sapiens
cacttgacttacatcawgagggaagaaccacct

SEQ ID NO: 2916 - DNA, 33 bp, homo sapiens
tctgaacttctaaacakgggaaaaattgctctt

SEQ ID NO: 2917 - DNA, 33 bp, homo sapiens
tctgcagcacaaagaayaagtatagaagaatat

SEQ ID NO: 2918 - DNA, 33 bp, homo sapiens
gtgcaataaggctagaygtcacacttaatggta

SEQ ID NO: 2919 - DNA, 33 bp, homo sapiens
taacaaactagacctawgtgacatttatagaga

SEQ ID NO: 2920 - DNA, 33 bp, homo sapiens
cttcatcagtgtaatgrattctcacattgcagt

SEQ ID NO: 2921 - DNA, 33 bp, homo sapiens
ttgaaaagatgagaaayaccattacgcagacaa

SEQ ID NO: 2922 - DNA, 33 bp, homo sapiens
ttcagacaggagaaatkaggtgaatagtcctgt

SEQ ID NO: 2923 - DNA, 33 bp, homo sapiens
ctaagacttctagtagyatggtgaaaagaattg

SEQ ID NO: 2924 - DNA, 33 bp, homo sapiens
atcacaaaatccttaawtacaccacatctacaa

SEQ ID NO: 2925 - DNA, 33 bp, homo sapiens
ggatatagaaacctgakctattttgatgaagaa

SEQ ID NO: 2926 - DNA, 33 bp, homo sapiens
gctgtgctaatttcaastccattcattctgcca

SEQ ID NO: 2927 - DNA, 33 bp, homo sapiens
ctgtgcttttagccacygactgaggcacagctt

SEQ ID NO: 2928 - DNA, 33 bp, homo sapiens
taaacatttaccattakatgacttatccaggag

SEQ ID NO: 2929 - DNA, 33 bp, homo sapiens
tcagagtcaatgtttakgggcactattgtttga

SEQ ID NO: 2930 - DNA, 33 bp, homo sapiens
taatgcacaccaacacrgtcaagaaaaatgaag

SEQ ID NO: 2931 - DNA, 33 bp, homo sapiens
gatctttataagaaagycaggagagtcagagtc

SEQ ID NO: 2932 - DNA, 33 bp, homo sapiens
atataaggtaagcgagsaagaattcatttatat

SEQ ID NO: 2933 - DNA, 33 bp, homo sapiens
cagttttattttatgcracaaaacagtattatt

SEQ ID NO: 2934 - DNA, 33 bp, homo sapiens
aaaaccagatataaacygaactaagtatgccaa

SEQ ID NO: 2935 - DNA, 33 bp, homo sapiens
tatccatccagttaccrggcaaacagacttggg

SEQ ID NO: 2936 - DNA, 33 bp, homo sapiens
tgttctcctttcactgmatccgtgtcaacatct

SEQ ID NO: 2937 - DNA, 33 bp, homo sapiens
tgtcatctcaaatatastaccctgtgcaaacct

SEQ ID NO: 2938 - DNA, 33 bp, homo sapiens
cacaagatttcaaatcmgaagccttgttatttt

SEQ ID NO: 2939 - DNA, 33 bp, homo sapiens
taaaaatacatattcckagacctcattcttgaa

SEQ ID NO: 2940 - DNA, 33 bp, homo sapiens
tcatgattctttatgarccttgtctctttgcat

SEQ ID NO: 2941 - DNA, 33 bp, homo sapiens
caacagctccgagttaraataatagatgcagtg

SEQ ID NO: 2942 - DNA, 33 bp, homo sapiens
ttatttacccaagaatsactcaggagcaggttg

SEQ ID NO: 2943 - DNA, 33 bp, homo sapiens
ccacagagggtgcctakgtctgtcctgaacaca

SEQ ID NO: 2944 - DNA, 33 bp, homo sapiens
tttttgtttcggggtayatttagagatttgtta

SEQ ID NO: 2945 - DNA, 33 bp, homo sapiens
ctctctacatatcttakagtgacattcagtatg

SEQ ID NO: 2946 - DNA, 33 bp, homo sapiens
gctaactagagccaaayaaaatatgggtggtca

SEQ ID NO: 2947 - DNA, 33 bp, homo sapiens
cattcatgtgtagaccygagagactgtcatttc

SEQ ID NO: 2948 - DNA, 33 bp, homo sapiens
accactcatttaatcayctgaaagaactgtgga

SEQ ID NO: 2949 - DNA, 33 bp, homo sapiens
gacacaccacacaagcraagtcctgaagagtac

SEQ ID NO: 2950 - DNA, 33 bp, homo sapiens
cctaattctctatcaastaaacttcctcttaag

SEQ ID NO: 2951 - DNA, 33 bp, homo sapiens
atagcctgaaccgaaawcccactgggcagtgag

SEQ ID NO: 2952 - DNA, 33 bp, homo sapiens
aaagttgctagaggtcrataggaattagttcca

SEQ ID NO: 2953 - DNA, 33 bp, homo sapiens
agtgttgtctcccgtcrcagtacaggagacaca

SEQ ID NO: 2954 - DNA, 33 bp, homo sapiens
taagaagaatattctargaatgtggtgtatgtt

SEQ ID NO: 2955 - DNA, 33 bp, homo sapiens
acagaggtagttactgmaattacccatgtttcc

SEQ ID NO: 2956 - DNA, 33 bp, homo sapiens
taattaaatctgcaaamatttcaacaataaggt

SEQ ID NO: 2957 - DNA, 33 bp, homo sapiens
tgagtgccttgtgagawtagtttaaccccaaga

SEQ ID NO: 2958 - DNA, 33 bp, homo sapiens
tatcattatgcagtcamtagaattgctaaaata

SEQ ID NO: 2959 - DNA, 33 bp, homo sapiens
aatgccccaggtaggawgaagcaggatagtgtg

SEQ ID NO: 2960 - DNA, 33 bp, homo sapiens
ttcataatcttataaarttccaggaagctgaat

SEQ ID NO: 2961 - DNA, 33 bp, homo sapiens
agaaaagatgagaggcrcaatgtaaagtaatgg

SEQ ID NO: 2962 - DNA, 33 bp, homo sapiens
aatgttttgagtatgtsaagtagtcaatattat

SEQ ID NO: 2963 - DNA, 33 bp, homo sapiens
gataaatagatagatarcctacatatgtcaata

SEQ ID NO: 2964 - DNA, 33 bp, homo sapiens
tggtactgtattgatcrctaaattcattcatat

SEQ ID NO: 2965 - DNA, 33 bp, homo sapiens
tttgaaagatgctctgragattttgtaggaaaa

SEQ ID NO: 2966 - DNA, 33 bp, homo sapiens
ttactttccatttgagwtacagctctggattgt

SEQ ID NO: 2967 - DNA, 33 bp, homo sapiens
catgatgtttaacataygtcagggtttatatgg

SEQ ID NO: 2968 - DNA, 33 bp, homo sapiens
agttttgagaacagatyatcaacagtgtcaaat

SEQ ID NO: 2969 - DNA, 33 bp, homo sapiens
attagcccaaggacacygattgataaatggtgc

SEQ ID NO: 2970 - DNA, 33 bp, homo sapiens
cttactatgtcaccaamacctctaagtacaatt

SEQ ID NO: 2971 - DNA, 33 bp, homo sapiens
tcactttcttgctggcyatttgcttgaagtgac

SEQ ID NO: 2972 - DNA, 33 bp, homo sapiens
aaatgcttagagagtasattagtgagattagtg

SEQ ID NO: 2973 - DNA, 33 bp, homo sapiens
cctaatttcctgtggcwcttaagaaagctttat

SEQ ID NO: 2974 - DNA, 33 bp, homo sapiens
taaacaaagggtaatamattggaagagcagtag

SEQ ID NO: 2975 - DNA, 33 bp, homo sapiens
acaaaacaacatttacsctgaggaaggaacact

SEQ ID NO: 2976 - DNA, 33 bp, homo sapiens
tgctttgctttcagtarcattagctgaagtaat

SEQ ID NO: 2977 - DNA, 33 bp, homo sapiens
tagcatgaacagtataygggagagtcaggagga

SEQ ID NO: 2978 - DNA, 33 bp, homo sapiens
agaacttggatggagcracaagggagagaactt

SEQ ID NO: 2979 - DNA, 33 bp, homo sapiens
tagttgagctacctgargtccagagaggttata

SEQ ID NO: 2980 - DNA, 33 bp, homo sapiens
atgtcaatcactgacgraaaaatcaagtagcta

SEQ ID NO: 2981 - DNA, 33 bp, homo sapiens
ttctacagctccaaatratgtgcaaggtcttgc

SEQ ID NO: 2982 - DNA, 33 bp, homo sapiens
ccatcagattttcttcycaagagtagtaagccc

SEQ ID NO: 2983 - DNA, 33 bp, homo sapiens
gagactaaaatactcaygtttacgttcatgttt

SEQ ID NO: 2984 - DNA, 33 bp, homo sapiens
cctattctggccttcayctttaagtgatgttct

SEQ ID NO: 2985 - DNA, 33 bp, homo sapiens
gcgacggtagggaccgracgaatcatgatcaga

SEQ ID NO: 2986 - DNA, 33 bp, homo sapiens
acaagaaactgacaacrgtagtggcctttgagg

SEQ ID NO: 2987 - DNA, 33 bp, homo sapiens
gttaattgaagactagrcccacaattaatttgt

SEQ ID NO: 2988 - DNA, 33 bp, homo sapiens
ggagaacaaattactgycaagccttcagcaaat

SEQ ID NO: 2989 - DNA, 33 bp, homo sapiens
gttttacctttcacagrcattacttcccaataa

SEQ ID NO: 2990 - DNA, 33 bp, homo sapiens
tatgccaagatgacaartgagaagtgcaagtgt

SEQ ID NO: 2991 - DNA, 33 bp, homo sapiens
gggagtgtctgttttaygtggttaaggactgaa

SEQ ID NO: 2992 - DNA, 33 bp, homo sapiens
ggtgatggtataagtamgacaatgatacttgtg

SEQ ID NO: 2993 - DNA, 33 bp, homo sapiens
ggctactttctatgccscagttagaactttctc

SEQ ID NO: 2994 - DNA, 33 bp, homo sapiens
taattcatgttttcaamaatacacagagataaa

SEQ ID NO: 2995 - DNA, 33 bp, homo sapiens
aatctctccttgatcayagtccatgtgtacttc

SEQ ID NO: 2996 - DNA, 33 bp, homo sapiens
tgctaacactctttacratgggtatttaaggcc

SEQ ID NO: 2997 - DNA, 33 bp, homo sapiens
aggtaaatagaacagtraagatcgaggaaaatc

SEQ ID NO: 2998 - DNA, 33 bp, homo sapiens
gagtggccaatgaatarcactgctggagtatat

SEQ ID NO: 2999 - DNA, 33 bp, homo sapiens
gagtaattcatagtcartctctttgtggggtcc

SEQ ID NO: 3000 - DNA, 33 bp, homo sapiens
tggtgtaaaattgtgcrctatgaggtattaaca

SEQ ID NO: 3001 - DNA, 33 bp, homo sapiens
cttttagattgtatcayctctttacactccaac

SEQ ID NO: 3002 - DNA, 33 bp, homo sapiens
ggcaacccaaagatgakgtaaattgctcctgct

SEQ ID NO: 3003 - DNA, 33 bp, homo sapiens
ctgaaattcaaactaayaaaatgtacatgctga

SEQ ID NO: 3004 - DNA, 33 bp, homo sapiens
ccaccctgactgatcayaatttgttattgcttc

SEQ ID NO: 3005 - DNA, 33 bp, homo sapiens
tctgagctaaaagaackgaaaacaatgatggtg

SEQ ID NO: 3006 - DNA, 33 bp, homo sapiens
ttcctgctaaatcatcyaccaattaacacaaag

SEQ ID NO: 3007 - DNA, 33 bp, homo sapiens
agtatggcaagccaacragaggtgatgttagtt

SEQ ID NO: 3008 - DNA, 33 bp, homo sapiens
gtatgccaaggtacaaygtcatccttcatgcca

SEQ ID NO: 3009 - DNA, 33 bp, homo sapiens
acaatttggtggttacycaagaaactaaatata

SEQ ID NO: 3010 - DNA, 33 bp, homo sapiens
cagtgcaactgcaacartgtccacccagacata

SEQ ID NO: 3011 - DNA, 33 bp, homo sapiens
aaaggatacagccatgrcaaaagaggaaacatt

SEQ ID NO: 3012 - DNA, 33 bp, homo sapiens
ccaacagatacggtggrccaactatacgggcaa

SEQ ID NO: 3013 - DNA, 33 bp, homo sapiens
acaaatctagcggccawgttctaacgagtgtac

SEQ ID NO: 3014 - DNA, 33 bp, homo sapiens
cctaagggcacggagaraggtacaattggaatg

SEQ ID NO: 3015 - DNA, 33 bp, homo sapiens
cttaattggaacaagaraggtcaagggaaaaga

SEQ ID NO: 3016 - DNA, 33 bp, homo sapiens
caaattatggctttcartaatgtcctctttttt

SEQ ID NO: 3017 - DNA, 33 bp, homo sapiens
aagggtaactcattcasaaaaccactaaccaag

SEQ ID NO: 3018 - DNA, 33 bp, homo sapiens
attccctcatgagtgargagtctgcagggccaa

SEQ ID NO: 3019 - DNA, 33 bp, homo sapiens
gactggatttgagtgaygggactcttcctaata

SEQ ID NO: 3020 - DNA, 33 bp, homo sapiens
ttggaggcccacacaaygaggatttatctttca

SEQ ID NO: 3021 - DNA, 33 bp, homo sapiens
gctggttattggttcaytcgttcctttgtccat

SEQ ID NO: 3022 - DNA, 33 bp, homo sapiens
ttgtatatttaagaagkctatttgtgtgtgact

SEQ ID NO: 3023 - DNA, 33 bp, homo sapiens
tgatccagacaagaaasatattatcagattatt

SEQ ID NO: 3024 - DNA, 33 bp, homo sapiens
atacaattatgttgacrctggagtataactaaa

SEQ ID NO: 3025 - DNA, 33 bp, homo sapiens
catggcggtacagatawcttttcaaggtaataa

SEQ ID NO: 3026 - DNA, 33 bp, homo sapiens
aatatcataatgtccastcataattgctaaatg

SEQ ID NO: 3027 - DNA, 33 bp, homo sapiens
ccctggctcatgtaaartccttctagccccact

SEQ ID NO: 3028 - DNA, 33 bp, homo sapiens
aaagtgcaaagtgacayggggaataaattggag

SEQ ID NO: 3029 - DNA, 33 bp, homo sapiens
ggacaagctttgttcayggcatggaagaatggc

SEQ ID NO: 3030 - DNA, 33 bp, homo sapiens
agacagtgaaatgataygtgtgttgatctgtgc

SEQ ID NO: 3031 - DNA, 33 bp, homo sapiens
tacaacaaatatggagwagccaaatattccgtc

SEQ ID NO: 3032 - DNA, 33 bp, homo sapiens
ttgaatatgggaactakgctttctctgatactg

SEQ ID NO: 3033 - DNA, 33 bp, homo sapiens
ccattatcctgactcakatgcttctcatttgtt

SEQ ID NO: 3034 - DNA, 33 bp, homo sapiens
caactcaggtaaggcargagatctgtacatacc

SEQ ID NO: 3035 - DNA, 33 bp, homo sapiens
ttaccacttggaatgawgcatatgtaatctaaa

SEQ ID NO: 3036 - DNA, 33 bp, homo sapiens
aaaatttgtaggtttcyctctatccatccattg

SEQ ID NO: 3037 - DNA, 33 bp, homo sapiens
gatgagaagacctgacmacctccgaaggagcag

SEQ ID NO: 3038 - DNA, 33 bp, homo sapiens
caatttcaatctcaacragtcccaaagagaagt

SEQ ID NO: 3039 - DNA, 33 bp, homo sapiens
ggaggacatacagatamatttagtcttcaaatg

SEQ ID NO: 3040 - DNA, 33 bp, homo sapiens
tcctgtccaggagggcyattcatgcctcagatc

SEQ ID NO: 3041 - DNA, 33 bp, homo sapiens
tgaagaatttttagatsaactatctcactaatt

SEQ ID NO: 3042 - DNA, 33 bp, homo sapiens
tttgtgaatatttgtamcttcctggtgtatttt

SEQ ID NO: 3043 - DNA, 33 bp, homo sapiens
caattgtagcatcttaraaaactatagtgtaat

SEQ ID NO: 3044 - DNA, 33 bp, homo sapiens
ttaggtcagacaataawtatgcccttccaataa

SEQ ID NO: 3045 - DNA, 33 bp, homo sapiens
agccaccgcgtgcccgrcctcgcagatttcttt

SEQ ID NO: 3046 - DNA, 33 bp, homo sapiens
gctctatgcttatgctsactgcctgtactgctg

SEQ ID NO: 3047 - DNA, 33 bp, homo sapiens
ggttctcccgagctgawgagtatgtttttccat

SEQ ID NO: 3048 - DNA, 33 bp, homo sapiens
tgctccaggcaataaayactggagaagttcagt

SEQ ID NO: 3049 - DNA, 33 bp, homo sapiens
gtgtaggaattagctgsaggcagatcaagagat

SEQ ID NO: 3050 - DNA, 33 bp, homo sapiens
tgatttacaaactgtcraagaaattttacatat

SEQ ID NO: 3051 - DNA, 33 bp, homo sapiens
taaccagtagaatgaasaggcacagtcacctga

SEQ ID NO: 3052 - DNA, 33 bp, homo sapiens
cctgctttgggctgatraaaaaagtcgagaagt

SEQ ID NO: 3053 - DNA, 33 bp, homo sapiens
aaaaaacccctcaaccygacaacaggctattga

SEQ ID NO: 3054 - DNA, 33 bp, homo sapiens
attgatggggccataayggtatagatttgcagt

SEQ ID NO: 3055 - DNA, 33 bp, homo sapiens
tgttgcaagttgtgacmcatgttgtttcttgat

SEQ ID NO: 3056 - DNA, 33 bp, homo sapiens
attacttgtttggatayggcagtagggaagaac

SEQ ID NO: 3057 - DNA, 33 bp, homo sapiens
ggagtaagtgagcccakctagcctaagcgacaa

SEQ ID NO: 3058 - DNA, 33 bp, homo sapiens
gctcgttcactatgcaragtccaaataaacagt

SEQ ID NO: 3059 - DNA, 33 bp, homo sapiens
ctgagatactggagacraagcagccggcaccat

SEQ ID NO: 3060 - DNA, 33 bp, homo sapiens
tcagcaggacagaaagscatgggcccatgggca

SEQ ID NO: 3061 - DNA, 33 bp, homo sapiens
aaagtaacagaaaaaamccatagtggacctagg

SEQ ID NO: 3062 - DNA, 33 bp, homo sapiens
gactggactgcatggayaattcaacatatgaag

SEQ ID NO: 3063 - DNA, 33 bp, homo sapiens
gccacctgtacccggcsaaaaacgtcatatatt

SEQ ID NO: 3064 - DNA, 33 bp, homo sapiens
aaataaaaacatcttaygacaactgagccagaa

SEQ ID NO: 3065 - DNA, 33 bp, homo sapiens
cgttttgggtcgtaaaygagctgccgagggagg

SEQ ID NO: 3066 - DNA, 33 bp, homo sapiens
ggagacggagcttcccrgccctcgtgactcagt

SEQ ID NO: 3067 - DNA, 33 bp, homo sapiens
atctagggatgcttaargacatgccaaagcaaa

SEQ ID NO: 3068 - DNA, 33 bp, homo sapiens
cccagatggtttttgaygagcctgacctggaaa

SEQ ID NO: 3069 - DNA, 33 bp, homo sapiens
ggtgatcaggttgagaygaggtcatgaggatgc

SEQ ID NO: 3070 - DNA, 33 bp, homo sapiens
aggttcaaataacaacygtgtagtactgctcat

SEQ ID NO: 3071 - DNA, 33 bp, homo sapiens
tgcaaatctccctgtgracatctgtgccagaac

SEQ ID NO: 3072 - DNA, 33 bp, homo sapiens
tagggatggaactgtcrctagaagccaatacat

SEQ ID NO: 3073 - DNA, 33 bp, homo sapiens
ggggtttaaatgggaawcttggtatgggaaaca

SEQ ID NO: 3074 - DNA, 33 bp, homo sapiens
cactcgacttcattcarctgagccgggtcttgc

SEQ ID NO: 3075 - DNA, 33 bp, homo sapiens
ttggcttgttcctgaaycactgaaacaatgtcc

SEQ ID NO: 3076 - DNA, 33 bp, homo sapiens
tgtcctggagtgggctkacccaggctgcctttg

SEQ ID NO: 3077 - DNA, 33 bp, homo sapiens
aagcaatgctgttggaygggttgccttgaacct

SEQ ID NO: 3078 - DNA, 33 bp, homo sapiens
ttctcttggcacagccrcttcagttgttcaact

SEQ ID NO: 3079 - DNA, 33 bp, homo sapiens
cacagctggccgtttaygcctgggacccaagac

SEQ ID NO: 3080 - DNA, 33 bp, homo sapiens
agcacttcctggcatayagacagcagtctccag

SEQ ID NO: 3081 - DNA, 33 bp, homo sapiens
taaaatgtccggccgaygtttctggggtaggag

SEQ ID NO: 3082 - DNA, 33 bp, homo sapiens
acaagtgtatacagggkaatgtggtcagaggct

SEQ ID NO: 3083 - DNA, 33 bp, homo sapiens
tgttctttctactaaamcatggtgtaccctcct

SEQ ID NO: 3084 - DNA, 33 bp, homo sapiens
tgttgttctttgattayactgagtttcagcctg

SEQ ID NO: 3085 - DNA, 33 bp, homo sapiens
cccacgtacagttgcasatacactcaaatgttc

SEQ ID NO: 3086 - DNA, 33 bp, homo sapiens
gaacacaatgaacagamcactccacaatgccct

SEQ ID NO: 3087 - DNA, 33 bp, homo sapiens
aataagaaattactggratgtttagtgatgctt

SEQ ID NO: 3088 - DNA, 33 bp, homo sapiens
aaataaaagagcaccayaataggaaaagtaaac

SEQ ID NO: 3089 - DNA, 33 bp, homo sapiens
gcattcctgtgagatgmatcattgtttttcagt

SEQ ID NO: 3090 - DNA, 33 bp, homo sapiens
ccagatgaccagtaaayggtgaccagtatttgt

SEQ ID NO: 3091 - DNA, 33 bp, homo sapiens
ctgttactagtgcccaytgaattcattcgttat

SEQ ID NO: 3092 - DNA, 33 bp, homo sapiens
gccatctgtttaatcakcagttcttcaatattg

SEQ ID NO: 3093 - DNA, 33 bp, homo sapiens
tgcaaagcaatcttaaytctacataacaaccgg

SEQ ID NO: 3094 - DNA, 33 bp, homo sapiens
tgttagtaagctagccracataaaacatgtacc

SEQ ID NO: 3095 - DNA, 33 bp, homo sapiens
ttgtgagaacccaaccrgatggctctttgatct

SEQ ID NO: 3096 - DNA, 33 bp, homo sapiens
ctgccagattgtcatayggaggcctagattaga

SEQ ID NO: 3097 - DNA, 33 bp, homo sapiens
ctccatcaaaccagaawggtgatcaattcactg

SEQ ID NO: 3098 - DNA, 33 bp, homo sapiens
tttgaggcaatgaatayctcaataacctagatt

SEQ ID NO: 3099 - DNA, 33 bp, homo sapiens
attatatatcattaatraaactactgtccatga

SEQ ID NO: 3100 - DNA, 33 bp, homo sapiens
gctaaaagtagctagamagattatcccctaagc

SEQ ID NO: 3101 - DNA, 33 bp, homo sapiens
cagcctgtagccctaarccatgtccattagagc

SEQ ID NO: 3102 - DNA, 33 bp, homo sapiens
tttaatatgcacaaggyattccaggagaaagcc

SEQ ID NO: 3103 - DNA, 33 bp, homo sapiens
cttcttagagctgtaartaaactatgttacatg

SEQ ID NO: 3104 - DNA, 33 bp, homo sapiens
ttgcctgggagttttaygtcccctggagcggct

SEQ ID NO: 3105 - DNA, 33 bp, homo sapiens
ttctagagcagatgccrcaactcttaatactcc

SEQ ID NO: 3106 - DNA, 33 bp, homo sapiens
tgtgcaaaggtcctgcrgaagaagagagcttgc

SEQ ID NO: 3107 - DNA, 33 bp, homo sapiens
tattcactttttacacwctgggccattcccctg

SEQ ID NO: 3108 - DNA, 33 bp, homo sapiens
tcacattcagtgagaastagaaatccacagaat

SEQ ID NO: 3109 - DNA, 33 bp, homo sapiens
acaactttaaccttccrtttctatgataagtga

SEQ ID NO: 3110 - DNA, 33 bp, homo sapiens
gaaacaatctatgctamctgaaagcctttaggg

SEQ ID NO: 3111 - DNA, 33 bp, homo sapiens
gattgcttagggaagaygggtgcagtgatgaac

SEQ ID NO: 3112 - DNA, 33 bp, homo sapiens
ttttgctcttgaagaayaatatgcaattcaaaa

SEQ ID NO: 3113 - DNA, 33 bp, homo sapiens
aagtagagttatggcarcacgaaatagacaggc

SEQ ID NO: 3114 - DNA, 33 bp, homo sapiens
atgatgagtgatctagmaaagctggcaattaag

SEQ ID NO: 3115 - DNA, 33 bp, homo sapiens
agcagttactagttgargttttaaggagtaaaa

SEQ ID NO: 3116 - DNA, 33 bp, homo sapiens
catcagccaccccccaycttttttcataactgg

SEQ ID NO: 3117 - DNA, 33 bp, homo sapiens
cagttaactttgcacartattcttaagacttgt

SEQ ID NO: 3118 - DNA, 33 bp, homo sapiens
caagtcaaccatggtgkacctatactgcaacac

SEQ ID NO: 3119 - DNA, 33 bp, homo sapiens
tgaatgtccactggagratccaagtcactcagg

SEQ ID NO: 3120 - DNA, 33 bp, homo sapiens
ctgtgacccagggagaygaattgggttaccttt

SEQ ID NO: 3121 - DNA, 33 bp, homo sapiens
agcagagtggatcaacrgagtagttggggagat

SEQ ID NO: 3122 - DNA, 33 bp, homo sapiens
ttcttgaaagattaacmcatcacaattaatatc

SEQ ID NO: 3123 - DNA, 33 bp, homo sapiens
gtctgtgaaatatatcsaggttgtggtatctat

SEQ ID NO: 3124 - DNA, 33 bp, homo sapiens
ccctgcctctgccacaracttttgcctgggcat

SEQ ID NO: 3125 - DNA, 33 bp, homo sapiens
agcaaagcaagaggtamaatgtgaagcatgaac

SEQ ID NO: 3126 - DNA, 33 bp, homo sapiens
tttgtttttttgtggasagagtaccttgttggt

SEQ ID NO: 3127 - DNA, 33 bp, homo sapiens
ccagctatatcaataayggcccactgatgaaag

SEQ ID NO: 3128 - DNA, 33 bp, homo sapiens
tgaataagaattgtcayacatgaggggcattac

SEQ ID NO: 3129 - DNA, 33 bp, homo sapiens
taggtcaaatttgagaratgacagggccagtgg

SEQ ID NO: 3130 - DNA, 33 bp, homo sapiens
cataaggtaggaataaygtgtgtcatggggatt

SEQ ID NO: 3131 - DNA, 33 bp, homo sapiens
gaaacaaagtagtcackactctcctactctctc

SEQ ID NO: 3132 - DNA, 33 bp, homo sapiens
cttaaactaaaaccagmctccttgaagggaaaa

SEQ ID NO: 3133 - DNA, 33 bp, homo sapiens
cttcatacatttttagycctaggtgttaagcaa

SEQ ID NO: 3134 - DNA, 33 bp, homo sapiens
aatccaacgtgctcaarggctgcatttcttgct

SEQ ID NO: 3135 - DNA, 33 bp, homo sapiens
aggttttaacatttgakgtagtcccatttgtct

SEQ ID NO: 3136 - DNA, 33 bp, homo sapiens
tctgaaaggcagcaatyatgttttaagcatctt

SEQ ID NO: 3137 - DNA, 33 bp, homo sapiens
ctggctaacgagaaacragaagtctacccggga

SEQ ID NO: 3138 - DNA, 33 bp, homo sapiens
tcaaagacatacaaaaygttagagacaggaaca

SEQ ID NO: 3139 - DNA, 33 bp, homo sapiens
acatttccagatgaacrattacatttctttttt

SEQ ID NO: 3140 - DNA, 33 bp, homo sapiens
accttaccctaagaaaygctggtgccaagagtc

SEQ ID NO: 3141 - DNA, 33 bp, homo sapiens
cgaagaactccagctaracaggaaagttgtttg

SEQ ID NO: 3142 - DNA, 33 bp, homo sapiens
tttaggatctcagcaartggaattactcccaat

SEQ ID NO: 3143 - DNA, 33 bp, homo sapiens
ggcaaaggccataagcyactccagggcagaagg

SEQ ID NO: 3144 - DNA, 33 bp, homo sapiens
caagtccttgtaccacrccttgaagagcaaggc

SEQ ID NO: 3145 - DNA, 33 bp, homo sapiens
caaagtcaaggcatgcyctttagagacagcagc

SEQ ID NO: 3146 - DNA, 33 bp, homo sapiens
ttgtgctattggtaaarctccctggcactgaga

SEQ ID NO: 3147 - DNA, 33 bp, homo sapiens
agtcccaaagtttatayctctctgtgttagaat

SEQ ID NO: 3148 - DNA, 33 bp, homo sapiens
ctcacttccaacctcakagagaagatatgcagc

SEQ ID NO: 3149 - DNA, 33 bp, homo sapiens
gaccctggattaactgmagtttagatgccttgg

SEQ ID NO: 3150 - DNA, 33 bp, homo sapiens
agtccacctgggagaarctctcatctgcagcaa

SEQ ID NO: 3151 - DNA, 33 bp, homo sapiens
gactgtctgggtgttayagaaacaaacatccct

SEQ ID NO: 3152 - DNA, 33 bp, homo sapiens
ttttttaaagatgagarccatcaaagtaaacat

SEQ ID NO: 3153 - DNA, 33 bp, homo sapiens
atagacagctggggaascactcataataaacca

SEQ ID NO: 3154 - DNA, 33 bp, homo sapiens
gactagtgacagtccawtcctgtatttcacatc

SEQ ID NO: 3155 - DNA, 33 bp, homo sapiens
cacaaaagaagttttaygaatggcccataaaca

SEQ ID NO: 3156 - DNA, 33 bp, homo sapiens
agtgctgtattagttamatatccagatggaaaa

SEQ ID NO: 3157 - DNA, 33 bp, homo sapiens
cacagacaagggtaaamtaaagactgggtggaa

SEQ ID NO: 3158 - DNA, 33 bp, homo sapiens
acattaatgaaagaaamgtaagagacgctaaat

SEQ ID NO: 3159 - DNA, 33 bp, homo sapiens
tcatccttttcatcacmaagacctatttgtatc

SEQ ID NO: 3160 - DNA, 33 bp, homo sapiens
ttcttaaatttcagaaracatatccataattta

SEQ ID NO: 3161 - DNA, 33 bp, homo sapiens
ctctcatattgataagyaggtaaaatcatgttt

SEQ ID NO: 3162 - DNA, 33 bp, homo sapiens
aaaaatcccattcacastacaaaaatgtaaaaa

SEQ ID NO: 3163 - DNA, 33 bp, homo sapiens
gtccaggtaacaaataragctaacactcgtttg

SEQ ID NO: 3164 - DNA, 33 bp, homo sapiens
gggagacaggcaatgawtacataggaccatgtt

SEQ ID NO: 3165 - DNA, 33 bp, homo sapiens
tatggactaaggaaagscttccctgctagagga

SEQ ID NO: 3166 - DNA, 33 bp, homo sapiens
gatttctggcactaacmaacaactggtggtggg

SEQ ID NO: 3167 - DNA, 33 bp, homo sapiens
agaggaaggtgtgaackaatcacatggggagtg

SEQ ID NO: 3168 - DNA, 33 bp, homo sapiens
ctaccatatgccagacrctgtgttgcgtgaaaa

SEQ ID NO: 3169 - DNA, 33 bp, homo sapiens
agtgtcagtagaacacycttcacctatggaaaa

SEQ ID NO: 3170 - DNA, 33 bp, homo sapiens
tgagtaagtacactgartagttcaccttgaccc

SEQ ID NO: 3171 - DNA, 33 bp, homo sapiens
gctttgtatttgtctgyacattcttaggctgtt

SEQ ID NO: 3172 - DNA, 33 bp, homo sapiens
agcaggaaatctgaaargtagcctgtgtcaaag

SEQ ID NO: 3173 - DNA, 33 bp, homo sapiens
cgaccaagcacacttcraaattagcaatcttct

SEQ ID NO: 3174 - DNA, 33 bp, homo sapiens
gaaggacagaagagtarcagtctaggaaaggga

SEQ ID NO: 3175 - DNA, 33 bp, homo sapiens
atgtgcaactgtcagartaagctaccgactgtg

SEQ ID NO: 3176 - DNA, 33 bp, homo sapiens
aagctaggataaactaygtagagggcttctttt

SEQ ID NO: 3177 - DNA, 33 bp, homo sapiens
ttatagctgcctctcasgtaaaagaagccctct

SEQ ID NO: 3178 - DNA, 33 bp, homo sapiens
aggtaaactggtttgaygctaaattattctttt

SEQ ID NO: 3179 - DNA, 33 bp, homo sapiens
atgatgaaaacacatcracacaaggggtaacaa

SEQ ID NO: 3180 - DNA, 33 bp, homo sapiens
aagcacccagagccgamctcctaacacttgtgg

SEQ ID NO: 3181 - DNA, 33 bp, homo sapiens
ccagaaaagtgaatcawatgctcacgaacaagt

SEQ ID NO: 3182 - DNA, 33 bp, homo sapiens
aaaggcagcaatttaamggaaacagctgatagg

SEQ ID NO: 3183 - DNA, 33 bp, homo sapiens
acaggcaggctaacgarctagctgagttcacac

SEQ ID NO: 3184 - DNA, 33 bp, homo sapiens
gaatcttgactttccaratgtcaggaatcctga

SEQ ID NO: 3185 - DNA, 33 bp, homo sapiens
ctcccatcggcaaaagyatcacgatgatagtaa

SEQ ID NO: 3186 - DNA, 33 bp, homo sapiens
gatacctgtatttccaygctccaccctgtgaaa

SEQ ID NO: 3187 - DNA, 33 bp, homo sapiens
taagttttggacattayggagtttttggtgctt

SEQ ID NO: 3188 - DNA, 33 bp, homo sapiens
ccttgctgctgtctcamtaaagatcatgatgat

SEQ ID NO: 3189 - DNA, 33 bp, homo sapiens
cagggaggagaacatcrcagaggcaattatccc

SEQ ID NO: 3190 - DNA, 33 bp, homo sapiens
tgcctggaatcatatcwcatactagtactgtga

SEQ ID NO: 3191 - DNA, 33 bp, homo sapiens
agaaaatactaatagargatcctgaaagcttcc

SEQ ID NO: 3192 - DNA, 33 bp, homo sapiens
gcagccacgtctttacrgagtccctcacacgag

SEQ ID NO: 3193 - DNA, 33 bp, homo sapiens
tttgtttacagggatamctgggttcttccttct

SEQ ID NO: 3194 - DNA, 33 bp, homo sapiens
aagagaaaaataaatayactgctgccctgacac

SEQ ID NO: 3195 - DNA, 33 bp, homo sapiens
gtttcccttattgcaaygcttaatggtagtgtt

SEQ ID NO: 3196 - DNA, 33 bp, homo sapiens
gttgattgtaaagatakaaggcccaataattcc

SEQ ID NO: 3197 - DNA, 33 bp, homo sapiens
taacataacaattcacwaaactgtacaaataaa

SEQ ID NO: 3198 - DNA, 33 bp, homo sapiens
taagagagctggaatasactcagtggaacttaa

SEQ ID NO: 3199 - DNA, 33 bp, homo sapiens
gtgaaaaagtcaatgaygatgaagaacgtattc

SEQ ID NO: 3200 - DNA, 33 bp, homo sapiens
aggcaaacatgataaastgtacttatacaaacc

SEQ ID NO: 3201 - DNA, 33 bp, homo sapiens
tatgtatggattaggcraggtcatctgtaacac

SEQ ID NO: 3202 - DNA, 33 bp, homo sapiens
gtataaataatttatascttagtctgcactgta

SEQ ID NO: 3203 - DNA, 33 bp, homo sapiens
aacacattgaaatgaaragttagttggaattta

SEQ ID NO: 3204 - DNA, 33 bp, homo sapiens
tagaactgatcacttcrcacccatattcagctc

SEQ ID NO: 3205 - DNA, 33 bp, homo sapiens
ctggctgaaaaatacartaaacacaatgaaaca

SEQ ID NO: 3206 - DNA, 33 bp, homo sapiens
accaagccatttataargaaatcacctccatga

SEQ ID NO: 3207 - DNA, 33 bp, homo sapiens
aatggaacatatcacawgaaatgaaacagacaa

SEQ ID NO: 3208 - DNA, 33 bp, homo sapiens
tagatcaagtgaatgcmagtcagtttataaacc

SEQ ID NO: 3209 - DNA, 33 bp, homo sapiens
tgcggaacttctgatakaatgctgagggcgact

SEQ ID NO: 3210 - DNA, 33 bp, homo sapiens
ttttgtctgtgccaaascaaaacaaacaaacaa

SEQ ID NO: 3211 - DNA, 33 bp, homo sapiens
ctcagctaaaacagaaragagaaatttgagacc

SEQ ID NO: 3212 - DNA, 33 bp, homo sapiens
taatctctcatcaatargccaatctcttgctct

SEQ ID NO: 3213 - DNA, 33 bp, homo sapiens
ttacaggtggtataaakgaactttacagaaaag

SEQ ID NO: 3214 - DNA, 33 bp, homo sapiens
ttgtctaccatttgccyagaggtcacttttctc

SEQ ID NO: 3215 - DNA, 33 bp, homo sapiens
taaagaaatgccagtgracagtaaggattctcc

SEQ ID NO: 3216 - DNA, 33 bp, homo sapiens
actgacgtggtacactsagatgatggcattatt

SEQ ID NO: 3217 - DNA, 33 bp, homo sapiens
ccattgagttgaacaaygtaaatgaatgaattt

SEQ ID NO: 3218 - DNA, 33 bp, homo sapiens
aagtaagccatctttarggagcaagtccttctt

SEQ ID NO: 3219 - DNA, 33 bp, homo sapiens
ttccctatcatcatacwcctggcactttacaca

SEQ ID NO: 3220 - DNA, 33 bp, homo sapiens
tagaacggaggaagaaraggctgattgaggaaa

SEQ ID NO: 3221 - DNA, 33 bp, homo sapiens
cgtattctattcagcayggagttggtctcaagg

SEQ ID NO: 3222 - DNA, 33 bp, homo sapiens
agcacagtcaaataacyaaaggggacaggctgt

SEQ ID NO: 3223 - DNA, 33 bp, homo sapiens
taaaaaccctagtgacyccagcaaattagaagt

SEQ ID NO: 3224 - DNA, 33 bp, homo sapiens
catcacctgtgccagcwccaattgaccagtcgt

SEQ ID NO: 3225 - DNA, 33 bp, homo sapiens
aggacctgtagagaccrcacaaattctacacta

SEQ ID NO: 3226 - DNA, 33 bp, homo sapiens
catagaactgaaacacrgtgcagaacagaagtt

SEQ ID NO: 3227 - DNA, 33 bp, homo sapiens
ttgctttgcagaaacayacctccctggtgtctc

SEQ ID NO: 3228 - DNA, 33 bp, homo sapiens
atgtttgccattaactyacaaaatttatcgact

SEQ ID NO: 3229 - DNA, 33 bp, homo sapiens
aatcacaatgactgcartatgattctccagtta

SEQ ID NO: 3230 - DNA, 33 bp, homo sapiens
tatgtcttcctaaaaaycaacaagtctcatgcc

SEQ ID NO: 3231 - DNA, 33 bp, homo sapiens
actaaagaagtcttcayggatgagtggacaaac

SEQ ID NO: 3232 - DNA, 33 bp, homo sapiens
gagaagagggttgtcakgtggctaaaaatcacc

SEQ ID NO: 3233 - DNA, 33 bp, homo sapiens
actacccagtgtaatamaaaacagcaggaattt

SEQ ID NO: 3234 - DNA, 33 bp, homo sapiens
ttttgaaaggtaagcasagttttaattgaaaaa

SEQ ID NO: 3235 - DNA, 33 bp, homo sapiens
tagtcaaatcaaacacraacaatttagagaaaa

SEQ ID NO: 3236 - DNA, 33 bp, homo sapiens
tgttatataagtaaacrgcacactcacaggagt

SEQ ID NO: 3237 - DNA, 33 bp, homo sapiens
cattttgaaatcctagyactgtgaaggaaagtg

SEQ ID NO: 3238 - DNA, 33 bp, homo sapiens
atttcatctaatcaaawctgtttcatcttacac

SEQ ID NO: 3239 - DNA, 33 bp, homo sapiens
attctttattcaggagkagctggaaagacaaac

SEQ ID NO: 3240 - DNA, 33 bp, homo sapiens
aggtgcttactaagtcwctctcctaaaatctgg

SEQ ID NO: 3241 - DNA, 33 bp, homo sapiens
tgacttcttcaaaacarcactaaatgacagatg

SEQ ID NO: 3242 - DNA, 33 bp, homo sapiens
acttctacaggccagayattaagttcaaagaca

SEQ ID NO: 3243 - DNA, 33 bp, homo sapiens
atgttttctttcctgcyctatgtgattaagaaa

SEQ ID NO: 3244 - DNA, 33 bp, homo sapiens
cctgccttgaagtttakgtccagatgtaacaga

SEQ ID NO: 3245 - DNA, 33 bp, homo sapiens
gaaaagattggaaaggrcaatctaagaattggg

SEQ ID NO: 3246 - DNA, 33 bp, homo sapiens
ctatgattttctactaycctctaccccatgtat

SEQ ID NO: 3247 - DNA, 33 bp, homo sapiens
ggaatgggggtgagaargagtatatgtattttg

SEQ ID NO: 3248 - DNA, 33 bp, homo sapiens
gccctgtctacctttcsaattccacgttcctgt

SEQ ID NO: 3249 - DNA, 33 bp, homo sapiens
attcagtcacaagttamggtctcaaggacataa

SEQ ID NO: 3250 - DNA, 33 bp, homo sapiens
tctgtaggtttgagaamcacttgaagggaagca

SEQ ID NO: 3251 - DNA, 33 bp, homo sapiens
tgtgcctctttggtcakctaccttcctccagcc

SEQ ID NO: 3252 - DNA, 33 bp, homo sapiens
catggcaagaatgttamgagggaggtacgcagc

SEQ ID NO: 3253 - DNA, 33 bp, homo sapiens
gcatcactaaggcagasggagatgagccaggac

SEQ ID NO: 3254 - DNA, 33 bp, homo sapiens
tcactgtgttgccaacmgagatgatatctgata

SEQ ID NO: 3255 - DNA, 33 bp, homo sapiens
catagaggatattcaawcattttctcactttcc

SEQ ID NO: 3256 - DNA, 33 bp, homo sapiens
gctagattactgttaaratgggtgagtaacttt

SEQ ID NO: 3257 - DNA, 33 bp, homo sapiens
cagtgtgtttatatagyatacagcatgtattct

SEQ ID NO: 3258 - DNA, 33 bp, homo sapiens
ttctaggtaaatcactsaagatggctcatagtt

SEQ ID NO: 3259 - DNA, 33 bp, homo sapiens
actgcttaaagggtcayctttctaaaattcaaa

SEQ ID NO: 3260 - DNA, 33 bp, homo sapiens
agttcaggtttcatggycacctgatgtcccatg

SEQ ID NO: 3261 - DNA, 33 bp, homo sapiens
accttgattgtctttaygctacattgacaacat

SEQ ID NO: 3262 - DNA, 33 bp, homo sapiens
aagtaggtaatattaaygcagtttaagttttaa

SEQ ID NO: 3263 - DNA, 33 bp, homo sapiens
aaaaagagataattcastctatcacataatatt

SEQ ID NO: 3264 - DNA, 33 bp, homo sapiens
ctgaattatctcttttygcatctctgccctacc

SEQ ID NO: 3265 - DNA, 33 bp, homo sapiens
acccaatagtatgtcaytgaaacaaaacaatac

SEQ ID NO: 3266 - DNA, 33 bp, homo sapiens
tcattatatcaaatacragtgactcaaatttag

SEQ ID NO: 3267 - DNA, 33 bp, homo sapiens
cccatcggcaatgtatraggcttacggtttttt

SEQ ID NO: 3268 - DNA, 33 bp, homo sapiens
ttccatttaattaaaarccatggagtccctatg

SEQ ID NO: 3269 - DNA, 33 bp, homo sapiens
tgctaataacagaaccyggactacagtaaattt

SEQ ID NO: 3270 - DNA, 33 bp, homo sapiens
tcatttgctggtgtgcrcaaaacttagaaaata

SEQ ID NO: 3271 - DNA, 33 bp, homo sapiens
caggcctctgaaaaaasaaacaactcaaatagg

SEQ ID NO: 3272 - DNA, 33 bp, homo sapiens
ttagtttattagtccaygttttcaatttcattt

SEQ ID NO: 3273 - DNA, 33 bp, homo sapiens
ttttgtaagtaataaawcctctgcataaattca

SEQ ID NO: 3274 - DNA, 33 bp, homo sapiens
tctgcgggccagcaacycagagatccaggacag

SEQ ID NO: 3275 - DNA, 33 bp, homo sapiens
caggaaacattaagcargcagacaatttgaagg

SEQ ID NO: 3276 - DNA, 33 bp, homo sapiens
ggtctaacgtgagttaygggtgtttgttgtaca

SEQ ID NO: 3277 - DNA, 33 bp, homo sapiens
tcatttcaagaccttcraatcaccattgtgagt

SEQ ID NO: 3278 - DNA, 33 bp, homo sapiens
tttatctcatatgttayagaagttcctaaaagc

SEQ ID NO: 3279 - DNA, 33 bp, homo sapiens
taaactcaagtgtgaawctcattctttgctcat

SEQ ID NO: 3280 - DNA, 33 bp, homo sapiens
tatttggcctatcattraagcacctctcttacc

SEQ ID NO: 3281 - DNA, 33 bp, homo sapiens
agccactgtgctcagcmaaggcatattatttag

SEQ ID NO: 3282 - DNA, 33 bp, homo sapiens
cagaactactagcttaygagggtaattttagat

SEQ ID NO: 3283 - DNA, 33 bp, homo sapiens
aagctaaataccaaagsataaggcctgaacaac

SEQ ID NO: 3284 - DNA, 33 bp, homo sapiens
aagctggagactgctcrcggcacacccagtcca

SEQ ID NO: 3285 - DNA, 33 bp, homo sapiens
tctgaacatgcctctarggaacgatttatttta

SEQ ID NO: 3286 - DNA, 33 bp, homo sapiens
cttatggagtattgccmatctaagaagctcacc

SEQ ID NO: 3287 - DNA, 33 bp, homo sapiens
tcaatttctgccactaygtctctagttcaagca

SEQ ID NO: 3288 - DNA, 33 bp, homo sapiens
cctcctgacaagtacasgtccctatatcattga

SEQ ID NO: 3289 - DNA, 33 bp, homo sapiens
aggctaaagggtgaaamcacttcagattgagtg

SEQ ID NO: 3290 - DNA, 33 bp, homo sapiens
gacaccaaacagtaaayggcacatactaagagc

SEQ ID NO: 3291 - DNA, 33 bp, homo sapiens
ttgaaacttggcaaaaktattctgacatcattt

SEQ ID NO: 3292 - DNA, 33 bp, homo sapiens
ttgttcacactcaaagrataatatatataataa

SEQ ID NO: 3293 - DNA, 33 bp, homo sapiens
ctagttttgctacagaygtgtactcttcaatat

SEQ ID NO: 3294 - DNA, 33 bp, homo sapiens
acattagttagccaccygagaatagtgcctgat

SEQ ID NO: 3295 - DNA, 33 bp, homo sapiens
atgctattttcaaaagsagaattcagtgcagtc

SEQ ID NO: 3296 - DNA, 33 bp, homo sapiens
aagtgtttctgatagargaagtagcaaggtaaa

SEQ ID NO: 3297 - DNA, 33 bp, homo sapiens
tgcatctccctaacaasaatgtgtacttttcaa

SEQ ID NO: 3298 - DNA, 33 bp, homo sapiens
aagcaattccaaatgcraagagaatatccattc

SEQ ID NO: 3299 - DNA, 33 bp, homo sapiens
ctcatcttttctctggraaacaccttcaaagcc

SEQ ID NO: 3300 - DNA, 33 bp, homo sapiens
gcagcacttcaaagggmaattttcttcactgac

SEQ ID NO: 3301 - DNA, 33 bp, homo sapiens
attttagtacttctcaracttacttgataataa

SEQ ID NO: 3302 - DNA, 33 bp, homo sapiens
cagaaaaccaacaaagmagcattggacttaatc

SEQ ID NO: 3303 - DNA, 33 bp, homo sapiens
tttatgccaggggtgcrcagctttccaagaaaa

SEQ ID NO: 3304 - DNA, 33 bp, homo sapiens
caccctcaaaagatatkagattgccctccgcaa

SEQ ID NO: 3305 - DNA, 33 bp, homo sapiens
ataggctcagccactayctacttgagtgagctc

SEQ ID NO: 3306 - DNA, 33 bp, homo sapiens
tttcctgtgcttcttayaggttccaatggctga

SEQ ID NO: 3307 - DNA, 33 bp, homo sapiens
aacagtccaatggcaaygactggagatgtgtaa

SEQ ID NO: 3308 - DNA, 33 bp, homo sapiens
aacaaataaaaactggyagcaagatgttaagac

SEQ ID NO: 3309 - DNA, 33 bp, homo sapiens
ctcttgaaatactgccrctgaaactgtccgcat

SEQ ID NO: 3310 - DNA, 33 bp, homo sapiens
gcagagaataggtcaaraggggatgctgcaaaa

SEQ ID NO: 3311 - DNA, 33 bp, homo sapiens
gctttacctctgccacragtctgggagccataa

SEQ ID NO: 3312 - DNA, 33 bp, homo sapiens
gggtattgtagaggagratgacctggctacaat

SEQ ID NO: 3313 - DNA, 33 bp, homo sapiens
aagtttcaataatgaayggcttttatgtcttga

SEQ ID NO: 3314 - DNA, 33 bp, homo sapiens
attgattattgtgtgawagctctacttcccagg

SEQ ID NO: 3315 - DNA, 33 bp, homo sapiens
ccagcaccataccacascaaattgtcttctatg

SEQ ID NO: 3316 - DNA, 33 bp, homo sapiens
aggagttaaagctgtaygggtatcaaaagagca

SEQ ID NO: 3317 - DNA, 33 bp, homo sapiens
taggatctttttaacarctaggtctaggacagg

SEQ ID NO: 3318 - DNA, 33 bp, homo sapiens
gcgtttcaatagttcarggcggtcctttgtttc

SEQ ID NO: 3319 - DNA, 33 bp, homo sapiens
tgctaagctgcatcaayttgaggaggatttaaa

SEQ ID NO: 3320 - DNA, 33 bp, homo sapiens
gtcatccaatgtcatayctttgcacatagggca

SEQ ID NO: 3321 - DNA, 33 bp, homo sapiens
cactccattatgctcayatattgtttcctcatt

SEQ ID NO: 3322 - DNA, 33 bp, homo sapiens
aatgcatgaaaaataaygaccagaaatttatga

SEQ ID NO: 3323 - DNA, 33 bp, homo sapiens
ggcacagcatactccarggtgataggcccatga

SEQ ID NO: 3324 - DNA, 33 bp, homo sapiens
gcatcaatttcaataastgttgtggaattctcc

SEQ ID NO: 3325 - DNA, 33 bp, homo sapiens
ataaatccattttgtakgtaggatgtcagagac

SEQ ID NO: 3326 - DNA, 33 bp, homo sapiens
taccatgttttaggaaytatacttgtactgggg

SEQ ID NO: 3327 - DNA, 33 bp, homo sapiens
aaaatccaaatgaactyactaagatttgtactt

SEQ ID NO: 3328 - DNA, 33 bp, homo sapiens
ggaaactgatgagcaayagatggaaaatactct

SEQ ID NO: 3329 - DNA, 33 bp, homo sapiens
acatcaaaatgtcacayattcgaattgaggtaa

SEQ ID NO: 3330 - DNA, 33 bp, homo sapiens
cattctagactttccaygatctcaaaataatgt

SEQ ID NO: 3331 - DNA, 33 bp, homo sapiens
ggcagaagcaacatcaygggcaaagacctagag

SEQ ID NO: 3332 - DNA, 33 bp, homo sapiens
agctgaaaatggtcaaygaagtgaaattagatc

SEQ ID NO: 3333 - DNA, 33 bp, homo sapiens
tttactgacactttcamtaagactcacctaagg

SEQ ID NO: 3334 - DNA, 33 bp, homo sapiens
cagctattatcaatcargaagttggtatttgaa

SEQ ID NO: 3335 - DNA, 33 bp, homo sapiens
ggtaatggcccttacamctggagcaaagaaatc

SEQ ID NO: 3336 - DNA, 33 bp, homo sapiens
tagctatgctcagatamggatactaatctatgc

SEQ ID NO: 3337 - DNA, 33 bp, homo sapiens
agttgtactgcaatgaragatgtttgccccccc

SEQ ID NO: 3338 - DNA, 33 bp, homo sapiens
catttctttctacaacsaagaatcaatgcagca

SEQ ID NO: 3339 - DNA, 33 bp, homo sapiens
agtagtggtatgattawcaagtgttgtttctgt

SEQ ID NO: 3340 - DNA, 33 bp, homo sapiens
gaggttgtgtcatttasaagttgcaaagagttt

SEQ ID NO: 3341 - DNA, 33 bp, homo sapiens
taaatgaaaacaaaccrgactttgggatttgtt

SEQ ID NO: 3342 - DNA, 33 bp, homo sapiens
gccttcagaatttagascaacttgggcaggagt

SEQ ID NO: 3343 - DNA, 33 bp, homo sapiens
ttggaagatactgagcraaaacctagagcttat

SEQ ID NO: 3344 - DNA, 33 bp, homo sapiens
tttctgtctcagtaaawgctttccaaatttcca

SEQ ID NO: 3345 - DNA, 33 bp, homo sapiens
aggtcaagaaaagcaawgactaaggaattatta

SEQ ID NO: 3346 - DNA, 33 bp, homo sapiens
acattccaggagagaasgctctaacataatacc

SEQ ID NO: 3347 - DNA, 33 bp, homo sapiens
atttaatttcaaccacrcattttactaatgaaa

SEQ ID NO: 3348 - DNA, 33 bp, homo sapiens
attccagcatccagagraaattactactaatat

SEQ ID NO: 3349 - DNA, 33 bp, homo sapiens
atcatgagggatatgcmaaccaaactacaagga

SEQ ID NO: 3350 - DNA, 33 bp, homo sapiens
caattatccaacaaacrgatgcttataatcttg

SEQ ID NO: 3351 - DNA, 33 bp, homo sapiens
tgatatgaatcataaargacacctctaaaatct

SEQ ID NO: 3352 - DNA, 33 bp, homo sapiens
atctccagtcgtttaaygcttcaactatccaaa

SEQ ID NO: 3353 - DNA, 33 bp, homo sapiens
ataaagaaatgaagacmcatagagttgaaatga

SEQ ID NO: 3354 - DNA, 33 bp, homo sapiens
tgatgacaggatgtccraatagaaacatctggc

SEQ ID NO: 3355 - DNA, 33 bp, homo sapiens
gcttcctgtaccaccckgctcaagtagcggaca

SEQ ID NO: 3356 - DNA, 33 bp, homo sapiens
ttatgttttgtgctacrctgaggaatgcctttc

SEQ ID NO: 3357 - DNA, 33 bp, homo sapiens
gggtctctataggtaasgtcaggctgagaaagg

SEQ ID NO: 3358 - DNA, 33 bp, homo sapiens
gtggcgtgatcatagcycactacaatctcaaaa

SEQ ID NO: 3359 - DNA, 33 bp, homo sapiens
gggagaggagatcttcrccacttaaaataacta

SEQ ID NO: 3360 - DNA, 33 bp, homo sapiens
agatctcttgaagataygtctggcatcaagtca

SEQ ID NO: 3361 - DNA, 33 bp, homo sapiens
tgggcaccaaccaatcrgaagggactctggtat

SEQ ID NO: 3362 - DNA, 33 bp, homo sapiens
tgaatcctgaacccggkataccattgtgaaaag

SEQ ID NO: 3363 - DNA, 33 bp, homo sapiens
atattcactaacacccsaaagggagccaatgtg

SEQ ID NO: 3364 - DNA, 33 bp, homo sapiens
gagaaagcagattacgyaggttatgaacagcct

SEQ ID NO: 3365 - DNA, 33 bp, homo sapiens
tctaagtcttaataackgcaacctcttcccttt

SEQ ID NO: 3366 - DNA, 33 bp, homo sapiens
tcacagacctttatgtraaatgtcccataaaaa

SEQ ID NO: 3367 - DNA, 33 bp, homo sapiens
tataatacctaagtaayacctagattgttcaaa

SEQ ID NO: 3368 - DNA, 33 bp, homo sapiens
tctggcgttcctctcaytgactgggtattagtg

SEQ ID NO: 3369 - DNA, 33 bp, homo sapiens
gtaggcagagggctgartatatagaaaggcctg

SEQ ID NO: 3370 - DNA, 33 bp, homo sapiens
tcatcctagtgaattayggaacctcagaggggg

SEQ ID NO: 3371 - DNA, 33 bp, homo sapiens
tgaataatgtcctaaaytggtggttctcaactc

SEQ ID NO: 3372 - DNA, 33 bp, homo sapiens
agaaaatcttgcactcyacttctgagaaacatt

SEQ ID NO: 3373 - DNA, 33 bp, homo sapiens
cccagccttctagccakcagaatcatgaatcaa

SEQ ID NO: 3374 - DNA, 33 bp, homo sapiens
cagctttcagtaatgayggtggttgccaagaat

SEQ ID NO: 3375 - DNA, 33 bp, homo sapiens
ccaggactctctagcaraagaggtagtagtaac

SEQ ID NO: 3376 - DNA, 33 bp, homo sapiens
ttttatcatttagctgycacctataaatgagaa

SEQ ID NO: 3377 - DNA, 33 bp, homo sapiens
tcagctgagtaaaatargccttgtttgataatg

SEQ ID NO: 3378 - DNA, 33 bp, homo sapiens
gaacgctgtgtgtccaraaacattcctggttgt

SEQ ID NO: 3379 - DNA, 33 bp, homo sapiens
atgaaagtgatgtggtwaagcttagagaaaatt

SEQ ID NO: 3380 - DNA, 33 bp, homo sapiens
ccctcaatggcttacayagggcagttgctatgg

SEQ ID NO: 3381 - DNA, 33 bp, homo sapiens
acattttcaataggaargtgcgagtaactccaa

SEQ ID NO: 3382 - DNA, 33 bp, homo sapiens
tgtcgtcgagtccaacscacattcctcacattg

SEQ ID NO: 3383 - DNA, 33 bp, homo sapiens
actgttctaaaaagcakctggggaagtacgcac

SEQ ID NO: 3384 - DNA, 33 bp, homo sapiens
tctgcagtctggttcayagtaggcaatcagcat

SEQ ID NO: 3385 - DNA, 33 bp, homo sapiens
ttgttttgtcccttcaraattatcaaagaagga

SEQ ID NO: 3386 - DNA, 33 bp, homo sapiens
ccctcttactgcctgcracagatctgtcactaa

SEQ ID NO: 3387 - DNA, 33 bp, homo sapiens
ctgtcagcaccaactgyaatacctgacactcag

SEQ ID NO: 3388 - DNA, 33 bp, homo sapiens
aaggactagcaaacacrgtatctaaaaacctct

SEQ ID NO: 3389 - DNA, 33 bp, homo sapiens
tgtctagctctcctaawcttttatcttgctggc

SEQ ID NO: 3390 - DNA, 33 bp, homo sapiens
actggttcctggagtayaaccaagtccctgaaa

SEQ ID NO: 3391 - DNA, 33 bp, homo sapiens
cagtggagtgtgtaaaygctcttcagactgtgg

SEQ ID NO: 3392 - DNA, 33 bp, homo sapiens
ttggagtgactacctgscaatataaggagtaga

SEQ ID NO: 3393 - DNA, 33 bp, homo sapiens
gtgacataaaaggtgartaagatagcccctata

SEQ ID NO: 3394 - DNA, 33 bp, homo sapiens
gacatagaaggtatacratgtggaaactatgta

SEQ ID NO: 3395 - DNA, 33 bp, homo sapiens
tcctgcataatagtcartaatgttctcctacat

SEQ ID NO: 3396 - DNA, 33 bp, homo sapiens
tctggaatcataataasaatgaaagtgctatag

SEQ ID NO: 3397 - DNA, 33 bp, homo sapiens
ccctgccctgcaatccrgctaccctacttagcc

SEQ ID NO: 3398 - DNA, 33 bp, homo sapiens
catttatattaggctcrcaaattgcatagtgat

SEQ ID NO: 3399 - DNA, 33 bp, homo sapiens
tttccacctagacaacsattgcactgccaccat

SEQ ID NO: 3400 - DNA, 33 bp, homo sapiens
ttctttagctgcatccmacaagttttgatatgc

SEQ ID NO: 3401 - DNA, 33 bp, homo sapiens
ttcaaagagatttatcygagcagcttatcttta

SEQ ID NO: 3402 - DNA, 33 bp, homo sapiens
tgtatgaatatgtaacrgaaacattctggcaga

SEQ ID NO: 3403 - DNA, 33 bp, homo sapiens
cggtgtggaaatggaargagagactgactaatt

SEQ ID NO: 3404 - DNA, 33 bp, homo sapiens
tccatttcatgtgtgasgaagctaagactcaga

SEQ ID NO: 3405 - DNA, 33 bp, homo sapiens
aatgggacttaccacargaatcacaaggattgt

SEQ ID NO: 3406 - DNA, 33 bp, homo sapiens
aatatcagtgccctgamaaaagggatacactgt

SEQ ID NO: 3407 - DNA, 33 bp, homo sapiens
aagatttacttcaaaarttatttccaaacactc

SEQ ID NO: 3408 - DNA, 33 bp, homo sapiens
gaggccaaagagcatayacatggatgcaaaaga

SEQ ID NO: 3409 - DNA, 33 bp, homo sapiens
gcctttcaggttgcaargtagctattattctcc

SEQ ID NO: 3410 - DNA, 33 bp, homo sapiens
ggggaatgcatatgccraaattcatcaaattat

SEQ ID NO: 3411 - DNA, 33 bp, homo sapiens
atgatactcaaggatcrcagcacttcttatctg

SEQ ID NO: 3412 - DNA, 33 bp, homo sapiens
tggccaaaactcttacyatggcactcaaggtcc

SEQ ID NO: 3413 - DNA, 33 bp, homo sapiens
cagtttttgcatacaayactttcacaattatct

SEQ ID NO: 3414 - DNA, 33 bp, homo sapiens
tgaggctggaggctaayctctttatgcaggtgt

SEQ ID NO: 3415 - DNA, 33 bp, homo sapiens
accacatcgggcctgaycatttaaatactggtg

SEQ ID NO: 3416 - DNA, 33 bp, homo sapiens
ttctcaggatagaaagsatcatcaatatggcga

SEQ ID NO: 3417 - DNA, 33 bp, homo sapiens
tatttgtgccaagatawcataaaaaagtataaa

SEQ ID NO: 3418 - DNA, 33 bp, homo sapiens
tttagaaaaagaactayagaagattttgttgga

SEQ ID NO: 3419 - DNA, 33 bp, homo sapiens
gtgagagaaatatacayacaaacaactgtacat

SEQ ID NO: 3420 - DNA, 33 bp, homo sapiens
atacaagggtctagagragttgcatttgttcct

SEQ ID NO: 3421 - DNA, 33 bp, homo sapiens
tggctagcgagtgatcycagcaccatttactga

SEQ ID NO: 3422 - DNA, 33 bp, homo sapiens
ctgcatcataagataasagttgtattggaattt

SEQ ID NO: 3423 - DNA, 33 bp, homo sapiens
ggcctggtctacctgamaacctcaacttcaaac

SEQ ID NO: 3424 - DNA, 33 bp, homo sapiens
ttacttttgagatcacraaatgagcataaacag

SEQ ID NO: 3425 - DNA, 33 bp, homo sapiens
catattcatggtctccyacttatgtcgaagggg

SEQ ID NO: 3426 - DNA, 33 bp, homo sapiens
agaaaactgaatgtagkcctgattatttatggt

SEQ ID NO: 3427 - DNA, 33 bp, homo sapiens
gaagaagatgggttgaygtggcaaaactacgtg

SEQ ID NO: 3428 - DNA, 33 bp, homo sapiens
gatcatttaaaagaggrcaaagctgcagtgttt

SEQ ID NO: 3429 - DNA, 33 bp, homo sapiens
tcttttgccatgctcaraatgtacagctgatat

SEQ ID NO: 3430 - DNA, 33 bp, homo sapiens
tacataggatgatcagragggttttctctgagg

SEQ ID NO: 3431 - DNA, 33 bp, homo sapiens
cacaccgcaaattccaygccttaggaaaaagga

SEQ ID NO: 3432 - DNA, 33 bp, homo sapiens
tatttagggagcactcwctttatagtacacctc

SEQ ID NO: 3433 - DNA, 33 bp, homo sapiens
ccctgcaactgatgagragaccagtagtgtcga

SEQ ID NO: 3434 - DNA, 33 bp, homo sapiens
gaggtagaagcatctcyaaaaacaggaagcagc

SEQ ID NO: 3435 - DNA, 33 bp, homo sapiens
aaaggaaaagttaaaaycatgctgagatatctt

SEQ ID NO: 3436 - DNA, 33 bp, homo sapiens
aaacaacaccaaatcaytattagcagttacggt

SEQ ID NO: 3437 - DNA, 33 bp, homo sapiens
cccaaatgattctcagmacagcccagagagctg

SEQ ID NO: 3438 - DNA, 33 bp, homo sapiens
atcagaaccaatcacasgagcaggtccaacttg

SEQ ID NO: 3439 - DNA, 33 bp, homo sapiens
tacacaccttgttttayggaatatgcttgtgag

SEQ ID NO: 3440 - DNA, 33 bp, homo sapiens
ggtatctggagtgcacraatgagaggctgcaga

SEQ ID NO: 3441 - DNA, 33 bp, homo sapiens
gcattcaacctgggcgwcatcctatgtaatctg

SEQ ID NO: 3442 - DNA, 33 bp, homo sapiens
atatatatttaaacctmactttagccaatgtga

SEQ ID NO: 3443 - DNA, 33 bp, homo sapiens
gtcgtcagcaggggaasagatagcagttgctcc

SEQ ID NO: 3444 - DNA, 33 bp, homo sapiens
ttactgtgcaccagaaygtactccttctgtcta

SEQ ID NO: 3445 - DNA, 33 bp, homo sapiens
aaagcaaagtgaaaacrcctcttttgcacccca

SEQ ID NO: 3446 - DNA, 33 bp, homo sapiens
ctgggagtgtgggcgcygattactcacactgtg

SEQ ID NO: 3447 - DNA, 33 bp, homo sapiens
tgcatcccagagctgaraagttatgtgcgagaa

SEQ ID NO: 3448 - DNA, 33 bp, homo sapiens
ggatgatttacaagagyacaaaagctaagcgtg

SEQ ID NO: 3449 - DNA, 33 bp, homo sapiens
gcataataagtcagaargaaaatatggatatac

SEQ ID NO: 3450 - DNA, 33 bp, homo sapiens
ttacctgcctgtattcyaaaattatcttgggta

SEQ ID NO: 3451 - DNA, 33 bp, homo sapiens
gcagaaggcagtattaygtacatggatcgtctc

SEQ ID NO: 3452 - DNA, 33 bp, homo sapiens
cagagaggtgactgacrggatggaagctggaag

SEQ ID NO: 3453 - DNA, 33 bp, homo sapiens
agggacccagtggaaayaactgaagcgtgggga

SEQ ID NO: 3454 - DNA, 33 bp, homo sapiens
ttgatattatccataaygtgtattgcaaatatc

SEQ ID NO: 3455 - DNA, 33 bp, homo sapiens
acaagaaaggtaaggcragactgactaggaaaa

SEQ ID NO: 3456 - DNA, 33 bp, homo sapiens
tgtgacctgtcaccacragagaacaccagcaaa

SEQ ID NO: 3457 - DNA, 33 bp, homo sapiens
cctcgaggctggcacayccacggcccagggcag

SEQ ID NO: 3458 - DNA, 33 bp, homo sapiens
aagatacacactgaaawcagctgaccttcagtt

SEQ ID NO: 3459 - DNA, 33 bp, homo sapiens
ctgtggagtccgaccasgtgcctctctgtgata

SEQ ID NO: 3460 - DNA, 33 bp, homo sapiens
tggttttccctgtaccrcgaaggtcagggaggt

SEQ ID NO: 3461 - DNA, 33 bp, homo sapiens
agaggaaggtgtttccsctttgcacatttcatc

SEQ ID NO: 3462 - DNA, 33 bp, homo sapiens
aaggtctgggacagccscaaaagccacattttg

SEQ ID NO: 3463 - DNA, 33 bp, homo sapiens
gttcatattactggggyccagatgtaaagttgg

SEQ ID NO: 3464 - DNA, 33 bp, homo sapiens
tgaggtgtgttctttcratggctagttagttga

SEQ ID NO: 3465 - DNA, 33 bp, homo sapiens
ggtggagggacaaagayggccagcccctagcat

SEQ ID NO: 3466 - DNA, 33 bp, homo sapiens
atgcagggagatgtgaraaggtcccctggtccc

SEQ ID NO: 3467 - DNA, 33 bp, homo sapiens
tgagtaccgaggagcaytgagtacgtgggcccc

SEQ ID NO: 3468 - DNA, 33 bp, homo sapiens
tccagagaggggtgaasaattgaggccattaat

SEQ ID NO: 3469 - DNA, 33 bp, homo sapiens
tcctgtgaccttgttaygggaaaataataagcc

SEQ ID NO: 3470 - DNA, 33 bp, homo sapiens
ttggagtctaatgcgcmgaccccctcggaaact

SEQ ID NO: 3471 - DNA, 33 bp, homo sapiens
gttaaggatcctgagayggaaagaagatcctgg

SEQ ID NO: 3472 - DNA, 33 bp, homo sapiens
acacaggttttcaggckagacaaattccccaat

SEQ ID NO: 3473 - DNA, 33 bp, homo sapiens
tctccatctcaattggycacttaggaagcatac

SEQ ID NO: 3474 - DNA, 33 bp, homo sapiens
tattgtacctgtgatcmcttcacgaccaacatc

SEQ ID NO: 3475 - DNA, 33 bp, homo sapiens
gttctacagagagaaaygaatgcggagaaccta

SEQ ID NO: 3476 - DNA, 33 bp, homo sapiens
tgtccacggttcatccrcctctacgtccccagg

SEQ ID NO: 3477 - DNA, 33 bp, homo sapiens
atatcagaaaaccaccwacttcaattccccacc

SEQ ID NO: 3478 - DNA, 33 bp, homo sapiens
tgcccacagcagcttaygttctgggggagggga

SEQ ID NO: 3479 - DNA, 33 bp, homo sapiens
ggccacaagacattcaracaggttggctgtaaa

SEQ ID NO: 3480 - DNA, 33 bp, homo sapiens
aggctcagtgacctacyatctccatttccaggt

SEQ ID NO: 3481 - DNA, 33 bp, homo sapiens
ggcgatggcgggaagaygacagtgatcgggccc

SEQ ID NO: 3482 - DNA, 33 bp, homo sapiens
gcctctcatcaataacmatcagtggaaagcaag

SEQ ID NO: 3483 - DNA, 33 bp, homo sapiens
gggaataacgaacaagraggctcccaaagtggt

SEQ ID NO: 3484 - DNA, 33 bp, homo sapiens
aaataaatgaaagcgaratcatcccacatcaat

SEQ ID NO: 3485 - DNA, 33 bp, homo sapiens
tctcttgacagttccawtaattccttagaactt

SEQ ID NO: 3486 - DNA, 33 bp, homo sapiens
cacctcagtgaatgggsacttattgcttctggg

SEQ ID NO: 3487 - DNA, 33 bp, homo sapiens
aaaatccatgtgtgatsaaatcaaaatagcttc

SEQ ID NO: 3488 - DNA, 33 bp, homo sapiens
ccatttctgtgggtctkaacaaggcgcttgtac

SEQ ID NO: 3489 - DNA, 33 bp, homo sapiens
aatacttctagggccaytgagacctcacctatg

SEQ ID NO: 3490 - DNA, 33 bp, homo sapiens
cagcatttgtgatgaartcttttgcaagggggt

SEQ ID NO: 3491 - DNA, 33 bp, homo sapiens
acattctcagaaatacracttacctaaacagac

SEQ ID NO: 3492 - DNA, 33 bp, homo sapiens
tttggggcctcagagtsaagggtataggcagga

SEQ ID NO: 3493 - DNA, 33 bp, homo sapiens
cggcagcatcaagacarcctttgcagcccggct

SEQ ID NO: 3494 - DNA, 33 bp, homo sapiens
tgaatttggctgatgaytaagaaaggctgttac

SEQ ID NO: 3495 - DNA, 33 bp, homo sapiens
gccttgacctttgtaasatgagcggctcctgaa

SEQ ID NO: 3496 - DNA, 33 bp, homo sapiens
cttgtactgtgttactraagttatgccgttgat

SEQ ID NO: 3497 - DNA, 33 bp, homo sapiens
cagaccagacccccacrgcaccacaggatgccc

SEQ ID NO: 3498 - DNA, 33 bp, homo sapiens
ataaagatgagaacccratttcgggaagtgcca

SEQ ID NO: 3499 - DNA, 33 bp, homo sapiens
gacaccaccaagtttgraccctaagacttttcc

SEQ ID NO: 3500 - DNA, 33 bp, homo sapiens
ccagaaaaatggtttgragtagtcgagtgtgac

SEQ ID NO: 3501 - DNA, 33 bp, homo sapiens
attctcccataatttcraagttggaagtaacgt

SEQ ID NO: 3502 - DNA, 33 bp, homo sapiens
ctcagtgctcagactarggcttcttaaatgaac

SEQ ID NO: 3503 - DNA, 33 bp, homo sapiens
ggagggagaatgagaarccctttaaactacaga

SEQ ID NO: 3504 - DNA, 33 bp, homo sapiens
aacaaaataaagaagayggctaattcctatgga

SEQ ID NO: 3505 - DNA, 33 bp, homo sapiens
cacaggatccgctaacygacccctaagccacat

SEQ ID NO: 3506 - DNA, 33 bp, homo sapiens
agatactgaaattacamcctcaggcaattcctt

SEQ ID NO: 3507 - DNA, 33 bp, homo sapiens
atcttttgcttttgtamatccatctgtgagccc

SEQ ID NO: 3508 - DNA, 33 bp, homo sapiens
aggtcaccagtatttgyaaggaagaaggacaga

SEQ ID NO: 3509 - DNA, 33 bp, homo sapiens
agccaatcctctcaaargctgtattttcagcca

SEQ ID NO: 3510 - DNA, 33 bp, homo sapiens
aaaggcaattgatctcyagtgggcaacagtgat

SEQ ID NO: 3511 - DNA, 33 bp, homo sapiens
gatataggaaatgtcawgttgtaaggatcctgg

SEQ ID NO: 3512 - DNA, 33 bp, homo sapiens
aaacaattaagttgacragacagaaaaatggag

SEQ ID NO: 3513 - DNA, 33 bp, homo sapiens
tactgctctattccccrataacacataataaaa

SEQ ID NO: 3514 - DNA, 33 bp, homo sapiens
tgatacaccatatcaarcatttaatctccaaat

SEQ ID NO: 3515 - DNA, 33 bp, homo sapiens
agtggtgaacatttaarctctctgggaacgcct

SEQ ID NO: 3516 - DNA, 33 bp, homo sapiens
atgagcaccactgtcartaatattctaccctaa

SEQ ID NO: 3517 - DNA, 33 bp, homo sapiens
cgtaggataccactgakagaaccacttctagaa

SEQ ID NO: 3518 - DNA, 33 bp, homo sapiens
atatactaatatccacygctctcaaacattgaa

SEQ ID NO: 3519 - DNA, 33 bp, homo sapiens
tctagggtcaataggcwactagacaacatatct

SEQ ID NO: 3520 - DNA, 33 bp, homo sapiens
tttcctgcaatgaagasagattgattcagaaat

SEQ ID NO: 3521 - DNA, 33 bp, homo sapiens
tatcttaagaacataawcatggctgaataatat

SEQ ID NO: 3522 - DNA, 33 bp, homo sapiens
aaagcaaatagaaacartggaatgttcacagtg

SEQ ID NO: 3523 - DNA, 33 bp, homo sapiens
aaagttcattatgttcwcaacttgctgttgcca

SEQ ID NO: 3524 - DNA, 33 bp, homo sapiens
ccaggaaagctgatgaygtaactcaattcaaaa

SEQ ID NO: 3525 - DNA, 33 bp, homo sapiens
aagtttagcccattgayaagtgtaggacacagg

SEQ ID NO: 3526 - DNA, 33 bp, homo sapiens
atttcctaattacaaawgttccagctatactct

SEQ ID NO: 3527 - DNA, 33 bp, homo sapiens
ctggggcttgagggtckcagccaggtgtccaga

SEQ ID NO: 3528 - DNA, 33 bp, homo sapiens
aatgacaagatggggaragtagctttgagaaga

SEQ ID NO: 3529 - DNA, 33 bp, homo sapiens
tggaaggaatctccaasttcggaggtgaccctg

SEQ ID NO: 3530 - DNA, 33 bp, homo sapiens
taatgcctgaaactgasaagtccagaaacagca

SEQ ID NO: 3531 - DNA, 33 bp, homo sapiens
ttccccacagacttccscttgtcatagctctgt

SEQ ID NO: 3532 - DNA, 33 bp, homo sapiens
taatgttcagtgcacawactcacaaactaagga

SEQ ID NO: 3533 - DNA, 33 bp, homo sapiens
ttaaaagtgaggtaacraatgttgcccaagatc

SEQ ID NO: 3534 - DNA, 33 bp, homo sapiens
gctgatgactcgtccargagcaatcatttggaa

SEQ ID NO: 3535 - DNA, 33 bp, homo sapiens
tcatatcaataaagtcrcatttctctgtggggg

SEQ ID NO: 3536 - DNA, 33 bp, homo sapiens
taccctcaggaagcacraaagtatcatatcaag

SEQ ID NO: 3537 - DNA, 33 bp, homo sapiens
ttcagatgctctggacratgactgtttgtttgt

SEQ ID NO: 3538 - DNA, 33 bp, homo sapiens
tcaatagggaaattgawaaacaggagtattttg

SEQ ID NO: 3539 - DNA, 33 bp, homo sapiens
cattcctggagttcagmaaattaaagaaagatt

SEQ ID NO: 3540 - DNA, 33 bp, homo sapiens
ggactcaaggggaagaktctaacctgctgctct

SEQ ID NO: 3541 - DNA, 33 bp, homo sapiens
tgtccaagagagctttsaaaaaggaagcaggca

SEQ ID NO: 3542 - DNA, 33 bp, homo sapiens
gctttattcatgataaytaaaaactggacacaa

SEQ ID NO: 3543 - DNA, 33 bp, homo sapiens
acatggaaatggcaacmaccccatgtggaacag

SEQ ID NO: 3544 - DNA, 33 bp, homo sapiens
tttaagccatcaaatayatggtaatgtggcctc

SEQ ID NO: 3545 - DNA, 33 bp, homo sapiens
atttttctctgtaataygttttccaggtcattt

SEQ ID NO: 3546 - DNA, 33 bp, homo sapiens
taagaatggtggttcaygtgtagggcatggaag

SEQ ID NO: 3547 - DNA, 33 bp, homo sapiens
caagtacatgaggatcrgacacttgattgaata

SEQ ID NO: 3548 - DNA, 33 bp, homo sapiens
ccaaaggaaggaacaargtggctgtatgcagaa

SEQ ID NO: 3549 - DNA, 33 bp, homo sapiens
tctcccttttctatgcrctcaactctcatggct

SEQ ID NO: 3550 - DNA, 33 bp, homo sapiens
actggtcctttcctcarggttggatattataca

SEQ ID NO: 3551 - DNA, 33 bp, homo sapiens
gatgctatgaagatcaygtatggtaggtaggca

SEQ ID NO: 3552 - DNA, 33 bp, homo sapiens
taccacatgggtccaartctgcttagtgaaaaa

SEQ ID NO: 3553 - DNA, 33 bp, homo sapiens
gtggccacgtgaattayactatatttattctct

SEQ ID NO: 3554 - DNA, 33 bp, homo sapiens
gggggttcaagctggaraactcaggtaagagga

SEQ ID NO: 3555 - DNA, 33 bp, homo sapiens
tttatcacagagaaaayctgacgtagacatata

SEQ ID NO: 3556 - DNA, 33 bp, homo sapiens
tgccagcctggccacamtccagtggtatcctgc

SEQ ID NO: 3557 - DNA, 33 bp, homo sapiens
cgccaaccagatttgcygaaattattgagaaga

SEQ ID NO: 3558 - DNA, 33 bp, homo sapiens
aataaatattctgaaastgatatgtgggttagc

SEQ ID NO: 3559 - DNA, 33 bp, homo sapiens
aatgcctgtatttgaamaagttgggtctattca

SEQ ID NO: 3560 - DNA, 33 bp, homo sapiens
aggacattgcttgttayagtaggatacggtgga

SEQ ID NO: 3561 - DNA, 33 bp, homo sapiens
cacttgctagcaaaaayctagacatgaaatcca

SEQ ID NO: 3562 - DNA, 33 bp, homo sapiens
tgtgtgtacaaaaaaawttcggttcgcagatta

SEQ ID NO: 3563 - DNA, 33 bp, homo sapiens
caagcagttttatggcrgcatttgttcctgggt

SEQ ID NO: 3564 - DNA, 33 bp, homo sapiens
tgggtctggaggtgaasaaagctatctatatac

SEQ ID NO: 3565 - DNA, 33 bp, homo sapiens
ggagataatactgacawtggaggttaagagcac

SEQ ID NO: 3566 - DNA, 33 bp, homo sapiens
ttaaatactcagtacaratatcaccaattgtat

SEQ ID NO: 3567 - DNA, 33 bp, homo sapiens
agatgggacctaattawactgaaatgcttttgc

SEQ ID NO: 3568 - DNA, 33 bp, homo sapiens
gcgtagaaccttaaaakattcatttgcggctgg

SEQ ID NO: 3569 - DNA, 33 bp, homo sapiens
gtccatattggtcttgractgtctaaagctacc

SEQ ID NO: 3570 - DNA, 33 bp, homo sapiens
ttctggaacacaactayggattcttggagtcag

SEQ ID NO: 3571 - DNA, 33 bp, homo sapiens
tatcccagaaccaaaartatttcctgagactta

SEQ ID NO: 3572 - DNA, 33 bp, homo sapiens
agtcttcctaattctargcaacattaattattt

SEQ ID NO: 3573 - DNA, 33 bp, homo sapiens
gacgcccaggactaaarcacaatgtgaggatgg

SEQ ID NO: 3574 - DNA, 33 bp, homo sapiens
gagttcctgcttactcraggatagtcagtcttt

SEQ ID NO: 3575 - DNA, 33 bp, homo sapiens
ctatgtgccttctttcrctattcttgaatttct

SEQ ID NO: 3576 - DNA, 33 bp, homo sapiens
tccctcactcagctaastgtttcagtacattaa

SEQ ID NO: 3577 - DNA, 33 bp, homo sapiens
tctgcaactatactagmagatttgcctgtattt

SEQ ID NO: 3578 - DNA, 33 bp, homo sapiens
tattcaaaatatttcayagggtgtcttccatcg

SEQ ID NO: 3579 - DNA, 33 bp, homo sapiens
ctaaggcttcattctakcatctgtaaattaaag

SEQ ID NO: 3580 - DNA, 33 bp, homo sapiens
tctggcacctgcataayggaaacccagggatcg

SEQ ID NO: 3581 - DNA, 33 bp, homo sapiens
gctgatacatttaaccrctaactcagagtatta

SEQ ID NO: 3582 - DNA, 33 bp, homo sapiens
ctagtaccaacaacaaycaaccaatcaaaaatg

SEQ ID NO: 3583 - DNA, 33 bp, homo sapiens
ttatcaatcctcatccsacatacaggatgaaag

SEQ ID NO: 3584 - DNA, 33 bp, homo sapiens
tacattagcaatttcawctttgtagtaattttg

SEQ ID NO: 3585 - DNA, 33 bp, homo sapiens
taaagaatctattggcratctctctcttcattg

SEQ ID NO: 3586 - DNA, 33 bp, homo sapiens
aagtgcaaaaccaggaraggatatggcaggcaa

SEQ ID NO: 3587 - DNA, 33 bp, homo sapiens
tgaacactggatataaytgcacagccaaaaata

SEQ ID NO: 3588 - DNA, 33 bp, homo sapiens
gccagaagccagaattraaggtgccaatagggt

SEQ ID NO: 3589 - DNA, 33 bp, homo sapiens
ggtaggagaaaaaagargatctatagcatagat

SEQ ID NO: 3590 - DNA, 33 bp, homo sapiens
tgagaaaactgattgcwagaggtagaacaacaa

SEQ ID NO: 3591 - DNA, 33 bp, homo sapiens
tagttataaacattatwagagcagaaatttatt

SEQ ID NO: 3592 - DNA, 33 bp, homo sapiens
gattgtcagcaaacatwaaatcactgtatctaa

SEQ ID NO: 3593 - DNA, 33 bp, homo sapiens
tctttgttctttaaaayggatgatctttccttc

SEQ ID NO: 3594 - DNA, 33 bp, homo sapiens
tatttccttagcaaaamtttatgtgaaggatgc

SEQ ID NO: 3595 - DNA, 33 bp, homo sapiens
atcaaaggtacaataawgacttcaaagtagaag

SEQ ID NO: 3596 - DNA, 33 bp, homo sapiens
atccagatcctcacacwgtcatcctgtcttatg

SEQ ID NO: 3597 - DNA, 33 bp, homo sapiens
tcagtcttctcttaggraaaacaaagtgaaaca

SEQ ID NO: 3598 - DNA, 33 bp, homo sapiens
ttcagaaaacttttgcwattgaactgttgaaaa

SEQ ID NO: 3599 - DNA, 33 bp, homo sapiens
atgcgagcccttactgyaggcttattttaaatc

SEQ ID NO: 3600 - DNA, 33 bp, homo sapiens
gaaatatgttgcaggayccgaacacttacccaa

SEQ ID NO: 3601 - DNA, 33 bp, homo sapiens
atatcccaggaaatcasagacttgggtgagctg

SEQ ID NO: 3602 - DNA, 33 bp, homo sapiens
gtgatattgcagaaaamtaatccatgatgtatc

SEQ ID NO: 3603 - DNA, 33 bp, homo sapiens
gacagctgggcctagasaataggaagttgagta

SEQ ID NO: 3604 - DNA, 33 bp, homo sapiens
ccatgtggcagaaataycaagtcaaaggcacag

SEQ ID NO: 3605 - DNA, 33 bp, homo sapiens
agctaattagctcattkaacagattagcagact

SEQ ID NO: 3606 - DNA, 33 bp, homo sapiens
agagatgagaggaagtsacagaggttgaaggca

SEQ ID NO: 3607 - DNA, 33 bp, homo sapiens
gcaagttagttgtttgraagtttcttgcaggaa

SEQ ID NO: 3608 - DNA, 33 bp, homo sapiens
ctctgaagatgcaacargtgtccgagagactca

SEQ ID NO: 3609 - DNA, 33 bp, homo sapiens
caaaggaagatgaatcrccttttcgggccagtg

SEQ ID NO: 3610 - DNA, 33 bp, homo sapiens
ttgtgtgagaaggatcrgagaagaacttgatga

SEQ ID NO: 3611 - DNA, 33 bp, homo sapiens
ctgtcattaagcaatgyatgggtatagctaata

SEQ ID NO: 3612 - DNA, 33 bp, homo sapiens
cttctttttaatttcartacaactgtttactca

SEQ ID NO: 3613 - DNA, 33 bp, homo sapiens
ggaaacaaatgggaaamgggcaccacagagtta

SEQ ID NO: 3614 - DNA, 33 bp, homo sapiens
ctacaatctcatgaacrctttgtcaatttcttc

SEQ ID NO: 3615 - DNA, 33 bp, homo sapiens
gaacattggtgtacaarccctgttcaaatctct

SEQ ID NO: 3616 - DNA, 33 bp, homo sapiens
aagtgattgtgattcartgaaataaggaccata

SEQ ID NO: 3617 - DNA, 33 bp, homo sapiens
tcttttctgaaaatacrcaaattcgtttacttc

SEQ ID NO: 3618 - DNA, 33 bp, homo sapiens
tcatgggttcattgaaytggtgtttgttgttgc

SEQ ID NO: 3619 - DNA, 33 bp, homo sapiens
tgtgaaagccttgaaakaagtgtcataaaggaa

SEQ ID NO: 3620 - DNA, 33 bp, homo sapiens
ttgtggcctaggtaagyctgccaagacaggctg

SEQ ID NO: 3621 - DNA, 33 bp, homo sapiens
tacagttgcatatgaayattttagcttttagac

SEQ ID NO: 3622 - DNA, 33 bp, homo sapiens
attggtagactgattawagactgctctcccaaa

SEQ ID NO: 3623 - DNA, 33 bp, homo sapiens
ttcaatcaagccaacamctaaaattaaccatca

SEQ ID NO: 3624 - DNA, 33 bp, homo sapiens
attggatagaggccagraattcagaggaaaagc

SEQ ID NO: 3625 - DNA, 33 bp, homo sapiens
tctggccaaattgagcraagataaagaaggagg

SEQ ID NO: 3626 - DNA, 33 bp, homo sapiens
caaaaatgagcagaaaktagagagaattccaat

SEQ ID NO: 3627 - DNA, 33 bp, homo sapiens
atagtactatatcttayggaagtgttggtggca

SEQ ID NO: 3628 - DNA, 33 bp, homo sapiens
tctagaaactccaggargtgaagtcgttgtgct

SEQ ID NO: 3629 - DNA, 33 bp, homo sapiens
ttcagatttgtaacgayatgaattttcattcag

SEQ ID NO: 3630 - DNA, 33 bp, homo sapiens
aattagaagcctttgcratggaagccagatttc

SEQ ID NO: 3631 - DNA, 33 bp, homo sapiens
cttgcattctgtcttcraccctttttatttaca

SEQ ID NO: 3632 - DNA, 33 bp, homo sapiens
gagatcagctatttgarcctcctgaaaatggtt

SEQ ID NO: 3633 - DNA, 33 bp, homo sapiens
tcagtcattattcttcrcagttcctcccatgct

SEQ ID NO: 3634 - DNA, 33 bp, homo sapiens
taaaactgccagggagwcagtaataaacacacc

SEQ ID NO: 3635 - DNA, 33 bp, homo sapiens
ttagaagtgttcctcartcttggtgctattgtc

SEQ ID NO: 3636 - DNA, 33 bp, homo sapiens
agttctcagctattgasatctttcttttacctt

SEQ ID NO: 3637 - DNA, 33 bp, homo sapiens
aattgctataagttaaytaatttagagggctct

SEQ ID NO: 3638 - DNA, 33 bp, homo sapiens
taacaaaggagcaaaarccttaaatgcctcacc

SEQ ID NO: 3639 - DNA, 33 bp, homo sapiens
tgctatatgaatgctcrgaacacttgaaaaggc

SEQ ID NO: 3640 - DNA, 33 bp, homo sapiens
ttcttacacagcgatgrcaagagaaagtgaggg

SEQ ID NO: 3641 - DNA, 33 bp, homo sapiens
ctctgcttctttgtgarctagaaaatcttaaaa

SEQ ID NO: 3642 - DNA, 33 bp, homo sapiens
aatgaaatatgatttayggagaaattgggagga

SEQ ID NO: 3643 - DNA, 33 bp, homo sapiens
taatcttcaggatgacyggtagaaagcagcgag

SEQ ID NO: 3644 - DNA, 33 bp, homo sapiens
cttatgggctattccartgatttagctgaatgg

SEQ ID NO: 3645 - DNA, 33 bp, homo sapiens
taagacaaaagacgaawaagagacactcaaata

SEQ ID NO: 3646 - DNA, 33 bp, homo sapiens
taacaagttaccaaaamcttagcagcttaatac

SEQ ID NO: 3647 - DNA, 33 bp, homo sapiens
tcatatatgtttgtgayagaggcagtatttgtc

SEQ ID NO: 3648 - DNA, 33 bp, homo sapiens
ttcacattttggtaacyatattgcttgagagac

SEQ ID NO: 3649 - DNA, 33 bp, homo sapiens
agtattaccttgcacaytgatactgtttatatc

SEQ ID NO: 3650 - DNA, 33 bp, homo sapiens
gaatagcagctgattcmaaatatgcagaaacct

SEQ ID NO: 3651 - DNA, 33 bp, homo sapiens
tacaaagaaagagaaamgtatggactattcaaa

SEQ ID NO: 3652 - DNA, 33 bp, homo sapiens
atggggaagaatgtaargagacaggcgtagtaa

SEQ ID NO: 3653 - DNA, 33 bp, homo sapiens
aggtcagatggtttcamaatcatttcacaatac

SEQ ID NO: 3654 - DNA, 33 bp, homo sapiens
tgatccacagcagagarcattataaatctaggt

SEQ ID NO: 3655 - DNA, 33 bp, homo sapiens
cctcaaacatatgagcratccaatcccagaatt

SEQ ID NO: 3656 - DNA, 33 bp, homo sapiens
tccagggtataaagtcmaggaggataaactgta

SEQ ID NO: 3657 - DNA, 33 bp, homo sapiens
catttttatggtcagcrctatttttgtactgtt

SEQ ID NO: 3658 - DNA, 33 bp, homo sapiens
tggctgactctatccamctttggttatacttct

SEQ ID NO: 3659 - DNA, 33 bp, homo sapiens
gttcactgtgttgatarctgcaaaattcactgt

SEQ ID NO: 3660 - DNA, 33 bp, homo sapiens
gtagtttgtaaagaacwagtcactggatgcagg

SEQ ID NO: 3661 - DNA, 33 bp, homo sapiens
gtaagaaaaatgctacrattgccagtaacagag

SEQ ID NO: 3662 - DNA, 33 bp, homo sapiens
tctgatagcacgtttcragttaacccttggccc

SEQ ID NO: 3663 - DNA, 33 bp, homo sapiens
tgttcccgaactgtgargcttttgagttttcaa

SEQ ID NO: 3664 - DNA, 33 bp, homo sapiens
ggcaaagtattcaatakgtttcgtgctatttta

SEQ ID NO: 3665 - DNA, 33 bp, homo sapiens
agagcaagtaacaagamgaaggtagaaaagaag

SEQ ID NO: 3666 - DNA, 33 bp, homo sapiens
tatctagagcttattayggtggtgttttaggtg

SEQ ID NO: 3667 - DNA, 33 bp, homo sapiens
aatatatgagactcaakttctacatctactaaa

SEQ ID NO: 3668 - DNA, 33 bp, homo sapiens
atgggttgcaaagacayagccttaactgactct

SEQ ID NO: 3669 - DNA, 33 bp, homo sapiens
agaatgcctaccgcaawctatgatcacaactgt

SEQ ID NO: 3670 - DNA, 33 bp, homo sapiens
atccattgcttactcayctccaactatactagc

SEQ ID NO: 3671 - DNA, 33 bp, homo sapiens
aagtcagttaacaaaartcttctctattcattt

SEQ ID NO: 3672 - DNA, 33 bp, homo sapiens
ctttcacacttaaactraaacattggcttgctc

SEQ ID NO: 3673 - DNA, 33 bp, homo sapiens
aatctccaaatcagcartcaacactccattact

SEQ ID NO: 3674 - DNA, 33 bp, homo sapiens
tttattaggcaattgasaaaaaggacttatttc

SEQ ID NO: 3675 - DNA, 33 bp, homo sapiens
tttttgactatcaagayggggagaaagtgagta

SEQ ID NO: 3676 - DNA, 33 bp, homo sapiens
attataatgatgatacracaaacttaggtgaaa

SEQ ID NO: 3677 - DNA, 33 bp, homo sapiens
ttatgtatctgctctaycagtgtgttttattct

SEQ ID NO: 3678 - DNA, 33 bp, homo sapiens
tcttcccaggtggagayggcaaggtgtgtctct

SEQ ID NO: 3679 - DNA, 33 bp, homo sapiens
ggattaaccaagaatcrctcagctaaaggttaa

SEQ ID NO: 3680 - DNA, 33 bp, homo sapiens
cttattagtaaccttgyaaagtgcccacaacca

SEQ ID NO: 3681 - DNA, 33 bp, homo sapiens
atgtaggtaaaacatayccccaccagacttcta

SEQ ID NO: 3682 - DNA, 33 bp, homo sapiens
ttttgtgtattacctawactgattcatcacact

SEQ ID NO: 3683 - DNA, 33 bp, homo sapiens
agaacagagtagattaygactaaggtttgcttt

SEQ ID NO: 3684 - DNA, 33 bp, homo sapiens
gatgtggcggtgtttcracaaaactttatttac

SEQ ID NO: 3685 - DNA, 33 bp, homo sapiens
ttagtgattcatttaaytctgtgtgccagagac

SEQ ID NO: 3686 - DNA, 33 bp, homo sapiens
ctctttattggatccaycagtcctcaagaggtt

SEQ ID NO: 3687 - DNA, 33 bp, homo sapiens
ccccaggtttgggctcsaggatctaatgaaaat

SEQ ID NO: 3688 - DNA, 33 bp, homo sapiens
taagctgcgtattcctyacttgattactgagtg

SEQ ID NO: 3689 - DNA, 33 bp, homo sapiens
gttgtttttaaaattcsagatgcccagtccctg

SEQ ID NO: 3690 - DNA, 33 bp, homo sapiens
ctttgtataccagctcragggaagtctgcattc

SEQ ID NO: 3691 - DNA, 33 bp, homo sapiens
tagaggaactctttccraactcttacttccttg

SEQ ID NO: 3692 - DNA, 33 bp, homo sapiens
aacagcgtctggcaaaygtgtttattgttatcc

SEQ ID NO: 3693 - DNA, 33 bp, homo sapiens
tacatagatggttggayattttgcatccaatgt

SEQ ID NO: 3694 - DNA, 33 bp, homo sapiens
atgttccatgttctccrctaatttcacttcaga

SEQ ID NO: 3695 - DNA, 33 bp, homo sapiens
tcattttcatggaagayattttgccgcagtcct

SEQ ID NO: 3696 - DNA, 33 bp, homo sapiens
cttcattcttggaccarctatcagaaaatttac

SEQ ID NO: 3697 - DNA, 33 bp, homo sapiens
tctaacataatgttaaygactacatgacactat

SEQ ID NO: 3698 - DNA, 33 bp, homo sapiens
ctagctgctttgccaaygttctgagcatcagga

SEQ ID NO: 3699 - DNA, 33 bp, homo sapiens
tgttctggacagttacwccttatctcaagatgt

SEQ ID NO: 3700 - DNA, 33 bp, homo sapiens
agccatgacaaaggtayaaatgcaggcaagtgt

SEQ ID NO: 3701 - DNA, 33 bp, homo sapiens
aatgcaatgctgaatarcaactggaaactttaa

SEQ ID NO: 3702 - DNA, 33 bp, homo sapiens
tttgtttgtctgtagawggttcactctgaagtc

SEQ ID NO: 3703 - DNA, 33 bp, homo sapiens
tcctccctctgtagtcycttaggtcttttggct

SEQ ID NO: 3704 - DNA, 33 bp, homo sapiens
cactcagaatcttccayctagactctgattttc

SEQ ID NO: 3705 - DNA, 33 bp, homo sapiens
ttgaacactgtatgaamacagagaccagattac

SEQ ID NO: 3706 - DNA, 33 bp, homo sapiens
acttaaatttagaaccwgacagtaggcctggca

SEQ ID NO: 3707 - DNA, 33 bp, homo sapiens
ggctcgttccctagtaygtttattcctgttgta

SEQ ID NO: 3708 - DNA, 33 bp, homo sapiens
tccttagaacaatgaarataaacaccaccacat

SEQ ID NO: 3709 - DNA, 33 bp, homo sapiens
cgctttccatatattgraggaatgtcatcttcc

SEQ ID NO: 3710 - DNA, 33 bp, homo sapiens
atctctagaacatcaartgatctctcttcaact

SEQ ID NO: 3711 - DNA, 33 bp, homo sapiens
ttgtgattatttctccygaacttttacagtttc

SEQ ID NO: 3712 - DNA, 33 bp, homo sapiens
agaaaatatccagaggrcaaatggcatataaaa

SEQ ID NO: 3713 - DNA, 33 bp, homo sapiens
aatgttagtggtaaackcaaggcttgattattt

SEQ ID NO: 3714 - DNA, 33 bp, homo sapiens
aaattattaaaaggtasagtagtcttggaataa

SEQ ID NO: 3715 - DNA, 33 bp, homo sapiens
acatccttattcatggyacagcatcatccatta

SEQ ID NO: 3716 - DNA, 33 bp, homo sapiens
acctttaacacagaagmaactaggccacttgaa

SEQ ID NO: 3717 - DNA, 33 bp, homo sapiens
ttataatctgacaaaargcgtcattctggtttt

SEQ ID NO: 3718 - DNA, 33 bp, homo sapiens
ttttatcttgaaaaacygtcttcttgcttcttc

SEQ ID NO: 3719 - DNA, 33 bp, homo sapiens
tacacagacataaaaasaactagatcatgtcct

SEQ ID NO: 3720 - DNA, 33 bp, homo sapiens
ttaagtaaccataaatwaagcaatgtattatag

SEQ ID NO: 3721 - DNA, 33 bp, homo sapiens
gaaaacatacatagaawtataccatcctgctta

SEQ ID NO: 3722 - DNA, 33 bp, homo sapiens
tgcctctttcctctccmgcgttcggattctaaa

SEQ ID NO: 3723 - DNA, 33 bp, homo sapiens
cagcgattagcaacacsaggaagattgatgtca

SEQ ID NO: 3724 - DNA, 33 bp, homo sapiens
tgtagttccatctctaygaggtatattctggtc

SEQ ID NO: 3725 - DNA, 33 bp, homo sapiens
ggaattagaaaacagawcttcattttaatcaaa

SEQ ID NO: 3726 - DNA, 33 bp, homo sapiens
acaatccatattaagasaacatgtcagtaatga

SEQ ID NO: 3727 - DNA, 33 bp, homo sapiens
tacctctctgtgtgtamcgccaagtcattttta

SEQ ID NO: 3728 - DNA, 33 bp, homo sapiens
ccataatgagatactaygacacaccagattggc

SEQ ID NO: 3729 - DNA, 33 bp, homo sapiens
catgcacacaattatgractggaaatataaatt

SEQ ID NO: 3730 - DNA, 33 bp, homo sapiens
aatgaatcaagtcagasgcatttttttctactc

SEQ ID NO: 3731 - DNA, 33 bp, homo sapiens
gatggcttcctcacatyagtgccagagaagtgt

SEQ ID NO: 3732 - DNA, 33 bp, homo sapiens
gcagaagcagagctaaycacgaccttggcggca

SEQ ID NO: 3733 - DNA, 33 bp, homo sapiens
gtacaatgtttaaagamgataacacactaaaat

SEQ ID NO: 3734 - DNA, 33 bp, homo sapiens
aagtgctatctttgcaracagacaaaacccttg

SEQ ID NO: 3735 - DNA, 33 bp, homo sapiens
aatataagtaactgaarctacaaattctgagaa

SEQ ID NO: 3736 - DNA, 33 bp, homo sapiens
tggtaagtgaacctggmagcccacgtggtctct

SEQ ID NO: 3737 - DNA, 33 bp, homo sapiens
actgcagaagtggtgamatgaactagagcctcg

SEQ ID NO: 3738 - DNA, 33 bp, homo sapiens
tgtagtttgaaattgarggacaaatttggtaaa

SEQ ID NO: 3739 - DNA, 33 bp, homo sapiens
tattctccatgttagckctctactttgaatgat

SEQ ID NO: 3740 - DNA, 33 bp, homo sapiens
gagggtgagtgaccatyactacctgagttccac

SEQ ID NO: 3741 - DNA, 33 bp, homo sapiens
cacttgacatttttatyacagttcctgaaacca

SEQ ID NO: 3742 - DNA, 33 bp, homo sapiens
gcttctgtgagattcckagttctaaataaggaa

SEQ ID NO: 3743 - DNA, 33 bp, homo sapiens
gacttctgtaccttcarcaagggtggctagagc

SEQ ID NO: 3744 - DNA, 33 bp, homo sapiens
aggtccctgcacatgcratcaataaggccagaa

SEQ ID NO: 3745 - DNA, 33 bp, homo sapiens
atttgaaggtgtgtcaytaaacataagcactca

SEQ ID NO: 3746 - DNA, 33 bp, homo sapiens
ttggctttagctttgaygaagcaatttgttgtt

SEQ ID NO: 3747 - DNA, 33 bp, homo sapiens
taaatatgtcaaaatcmatatgtttaacacctt

SEQ ID NO: 3748 - DNA, 33 bp, homo sapiens
cctcatctgcaaaaagrcaatatctacattata

SEQ ID NO: 3749 - DNA, 33 bp, homo sapiens
gctcaagaaacgctackacaaagagattaattt

SEQ ID NO: 3750 - DNA, 33 bp, homo sapiens
tcttaaggcactgcaaraatagccatgcccact

SEQ ID NO: 3751 - DNA, 33 bp, homo sapiens
tgtgtttaaaacttccwactcttgttcagacaa

SEQ ID NO: 3752 - DNA, 33 bp, homo sapiens
agaaagtgttaactgcyaagactggagaggtaa

SEQ ID NO: 3753 - DNA, 33 bp, homo sapiens
cagcttgttcttcaaayataggcttaaaagaaa

SEQ ID NO: 3754 - DNA, 33 bp, homo sapiens
acaagaagcaaatacaractaaaacctctgtcc

SEQ ID NO: 3755 - DNA, 33 bp, homo sapiens
agatgtagctgcaagawtatttccagataagaa

SEQ ID NO: 3756 - DNA, 33 bp, homo sapiens
atatctggacaagagargccaggcagatggaac

SEQ ID NO: 3757 - DNA, 33 bp, homo sapiens
gtagaatggatgcaaastattctgtcgaattga

SEQ ID NO: 3758 - DNA, 33 bp, homo sapiens
ttatccacattttctcrattggtatcaaagaga

SEQ ID NO: 3759 - DNA, 33 bp, homo sapiens
ctcagaataatgacaascaaggaataaggaaat

SEQ ID NO: 3760 - DNA, 33 bp, homo sapiens
taatccacagtttttamctctcaaagcacttat

SEQ ID NO: 3761 - DNA, 33 bp, homo sapiens
catcataggctaacaawcactggggaaagataa

SEQ ID NO: 3762 - DNA, 33 bp, homo sapiens
aattcttttcatcccgkaaatctgaaactctgt

SEQ ID NO: 3763 - DNA, 33 bp, homo sapiens
tagaatgtctaacccayaataggcatactagag

SEQ ID NO: 3764 - DNA, 33 bp, homo sapiens
taagccaggacagataragattgatatgtagca

SEQ ID NO: 3765 - DNA, 33 bp, homo sapiens
tgagaaaggcaatgcargcaatgtagaaaatgc

SEQ ID NO: 3766 - DNA, 33 bp, homo sapiens
actattgtatgagaatwagagatggcttctagg

SEQ ID NO: 3767 - DNA, 33 bp, homo sapiens
actataactctctcagrcattttgtgttcccat

SEQ ID NO: 3768 - DNA, 33 bp, homo sapiens
tgataagtaactgcaasgaaaatttttatgttt

SEQ ID NO: 3769 - DNA, 33 bp, homo sapiens
tccaacaattctaaacratcaaggaggtctatt

SEQ ID NO: 3770 - DNA, 33 bp, homo sapiens
gtccaagtactaccacratggacccaagatcta

SEQ ID NO: 3771 - DNA, 33 bp, homo sapiens
ttacaacgtttgacaaygagtcagttatttccc

SEQ ID NO: 3772 - DNA, 33 bp, homo sapiens
caatggttttattctakatgtactgtaagtggg

SEQ ID NO: 3773 - DNA, 33 bp, homo sapiens
gtgacaagctagcctayggtcagaatgaagaca

SEQ ID NO: 3774 - DNA, 33 bp, homo sapiens
catcaggaatatttcasaattccaaacctcttt

SEQ ID NO: 3775 - DNA, 33 bp, homo sapiens
caggctcatatataacwctagtcctggctccca

SEQ ID NO: 3776 - DNA, 33 bp, homo sapiens
ttcaaaatccataagckcttaataatatatatt

SEQ ID NO: 3777 - DNA, 33 bp, homo sapiens
aaccaactcctacatasagcagtccaaataagt

SEQ ID NO: 3778 - DNA, 33 bp, homo sapiens
cttcattcaagtggcckcgggtctataaactga

SEQ ID NO: 3779 - DNA, 33 bp, homo sapiens
aactcagttgggcaagwacaataattcaagttt

SEQ ID NO: 3780 - DNA, 33 bp, homo sapiens
tttgacgtccaacaatkacaacagcaaaataaa

SEQ ID NO: 3781 - DNA, 33 bp, homo sapiens
aaaaggtcgtctataawgcatttcatatggact

SEQ ID NO: 3782 - DNA, 33 bp, homo sapiens
ttccctttgacagtccraaataaaaaccactga

SEQ ID NO: 3783 - DNA, 33 bp, homo sapiens
acaggattatgcaccasattaaaagtagagggg

SEQ ID NO: 3784 - DNA, 33 bp, homo sapiens
atgcagccataaaaacygaattcctgtcattca

SEQ ID NO: 3785 - DNA, 33 bp, homo sapiens
tttgccttcccagaaartcatatggttgaaatc

SEQ ID NO: 3786 - DNA, 33 bp, homo sapiens
gcttctgacattttacragaaagaaatgagaca

SEQ ID NO: 3787 - DNA, 33 bp, homo sapiens
agccaggtacaatgaarggcacttaatatgatc

SEQ ID NO: 3788 - DNA, 33 bp, homo sapiens
gaagagttttcagacawaggatagtatacattt

SEQ ID NO: 3789 - DNA, 33 bp, homo sapiens
cttcatagagagggacrgagtaaaacagcttgt

SEQ ID NO: 3790 - DNA, 33 bp, homo sapiens
caacaatatctgagaakgaagatagaaagggaa

SEQ ID NO: 3791 - DNA, 33 bp, homo sapiens
gtaataccttttgctcycatctgccattagcaa

SEQ ID NO: 3792 - DNA, 33 bp, homo sapiens
ggaaatacgttacacakatacaagttcccagga

SEQ ID NO: 3793 - DNA, 33 bp, homo sapiens
tcaaaacacttaaccargcatttcactatggac

SEQ ID NO: 3794 - DNA, 33 bp, homo sapiens
caaggttttaaagcacmagacatgataaatttg

SEQ ID NO: 3795 - DNA, 33 bp, homo sapiens
ttctgcaaagacatacrcagaacagttaccttt

SEQ ID NO: 3796 - DNA, 33 bp, homo sapiens
taagcatttctaagcarcttccctctataagca

SEQ ID NO: 3797 - DNA, 33 bp, homo sapiens
agacaatgttcaaaackcttgataataatgtga

SEQ ID NO: 3798 - DNA, 33 bp, homo sapiens
taaaaaaaggacaaaaktcactaaaatcactcg

SEQ ID NO: 3799 - DNA, 33 bp, homo sapiens
atggaacacacggagaygatggaactgcagggc

SEQ ID NO: 3800 - DNA, 33 bp, homo sapiens
tcacactgggatggaaytatggaacctatgccc

SEQ ID NO: 3801 - DNA, 33 bp, homo sapiens
agttctggggtttttawgaaggttgcaaggttc

SEQ ID NO: 3802 - DNA, 33 bp, homo sapiens
gccatatttttttccartcatgttcagtgggta

SEQ ID NO: 3803 - DNA, 33 bp, homo sapiens
attaagtagcataaaarcaataggaattcattg

SEQ ID NO: 3804 - DNA, 33 bp, homo sapiens
aagatcagaagaatcamccagctgagcctagcc

SEQ ID NO: 3805 - DNA, 33 bp, homo sapiens
tttacattaagtcgtasagtataacaagctaaa

SEQ ID NO: 3806 - DNA, 33 bp, homo sapiens
cccattcatgttcaagyccgttatgggaggggg

SEQ ID NO: 3807 - DNA, 33 bp, homo sapiens
gttttttgtagcttcaragacaagcattgactt

SEQ ID NO: 3808 - DNA, 33 bp, homo sapiens
tattcaattgcatgaarcctcagagaggagagg

SEQ ID NO: 3809 - DNA, 33 bp, homo sapiens
tttgtatgcttctatckattgtgaaatgcttcc

SEQ ID NO: 3810 - DNA, 33 bp, homo sapiens
atattacagatttgaasagaaatagaaaacttt

SEQ ID NO: 3811 - DNA, 33 bp, homo sapiens
aaaaactggggatggargtaccagcagatttat

SEQ ID NO: 3812 - DNA, 33 bp, homo sapiens
tagaataaaccagtgamctttgtgtatctgtca

SEQ ID NO: 3813 - DNA, 33 bp, homo sapiens
atgcttgtataaaataygtgacaacaaatggag

SEQ ID NO: 3814 - DNA, 33 bp, homo sapiens
tcacattgctgtacaamaagtctctataatttt

SEQ ID NO: 3815 - DNA, 33 bp, homo sapiens
agttgtgaagagttacmctgaatagtcccccga

SEQ ID NO: 3816 - DNA, 33 bp, homo sapiens
aggagaccccgacccaraggaaagaagatagga

SEQ ID NO: 3817 - DNA, 33 bp, homo sapiens
ctacttatttggagaakcgctggtttcagggat

SEQ ID NO: 3818 - DNA, 33 bp, homo sapiens
aagcacagtattttgcraagggaggatattcaa

SEQ ID NO: 3819 - DNA, 33 bp, homo sapiens
tggcttccaaagttcamattaaaggcactgtcg

SEQ ID NO: 3820 - DNA, 33 bp, homo sapiens
catatcggccagatttratccaaataaactgaa

SEQ ID NO: 3821 - DNA, 33 bp, homo sapiens
gccatttcgatgagcgsagcagtgcttgataaa

SEQ ID NO: 3822 - DNA, 33 bp, homo sapiens
gctaatccaaaaaaaaygcagtaccaatgctat

SEQ ID NO: 3823 - DNA, 33 bp, homo sapiens
aactgaaactccaatcraaatttttgccactct

SEQ ID NO: 3824 - DNA, 33 bp, homo sapiens
taaagatgtatgtgtayaattgaagcaatgaca

SEQ ID NO: 3825 - DNA, 33 bp, homo sapiens
aaaattgagggtctcarattgcagggagaatga

SEQ ID NO: 3826 - DNA, 33 bp, homo sapiens
gtttaatttggaacacragaccaacagtatttt

SEQ ID NO: 3827 - DNA, 33 bp, homo sapiens
tctttttctaaccaggwactttccaagcaggtg

SEQ ID NO: 3828 - DNA, 33 bp, homo sapiens
ttattaagctccaacakctataggaaaaatata

SEQ ID NO: 3829 - DNA, 33 bp, homo sapiens
gaatactgtacatttaracctcattagcttacc

SEQ ID NO: 3830 - DNA, 33 bp, homo sapiens
ggatattgagagttcawtcccagaccaccacaa

SEQ ID NO: 3831 - DNA, 33 bp, homo sapiens
ccacttcatccctgaakataccttttggagcta

SEQ ID NO: 3832 - DNA, 33 bp, homo sapiens
atcctttgggtatgaaygttagaaacaagataa

SEQ ID NO: 3833 - DNA, 33 bp, homo sapiens
gtatatctcttcacaarttattgtagttgtagg

SEQ ID NO: 3834 - DNA, 33 bp, homo sapiens
atacttctagtacaaartaggtatgtctaaatc

SEQ ID NO: 3835 - DNA, 33 bp, homo sapiens
catctggaaacacctcrgaggaagaatggcatg

SEQ ID NO: 3836 - DNA, 33 bp, homo sapiens
aagttttagaggggacrattattcaaaccattg

SEQ ID NO: 3837 - DNA, 33 bp, homo sapiens
gcagacaatatgaaagrcttgatggtaaacata

SEQ ID NO: 3838 - DNA, 33 bp, homo sapiens
ccacgggagcttcaggmcacttcagcaattaca

SEQ ID NO: 3839 - DNA, 33 bp, homo sapiens
ggcgacgagagtgagcraaattcagtctcaaag

SEQ ID NO: 3840 - DNA, 33 bp, homo sapiens
aaagttctcaagttaarccatcctaagtcaagt

SEQ ID NO: 3841 - DNA, 33 bp, homo sapiens
ataacctgattacttgratttccttagccatga

SEQ ID NO: 3842 - DNA, 33 bp, homo sapiens
gagatttattcacatcrcatacccagattctgc

SEQ ID NO: 3843 - DNA, 33 bp, homo sapiens
tggagtttggaaaatargagatgtggttggaga

SEQ ID NO: 3844 - DNA, 33 bp, homo sapiens
gcaacaggaactttgcrcctttcctggtctctt

SEQ ID NO: 3845 - DNA, 33 bp, homo sapiens
ctggtagcagatgtcarcctcttgtcaatccag

SEQ ID NO: 3846 - DNA, 33 bp, homo sapiens
gctgctctgaggcccayaagaactcgcatcctg

SEQ ID NO: 3847 - DNA, 33 bp, homo sapiens
agtcagatgaaagagaygtttactgggaaagct

SEQ ID NO: 3848 - DNA, 33 bp, homo sapiens
caagttgaaagagaaaygtatgattccacgctc

SEQ ID NO: 3849 - DNA, 33 bp, homo sapiens
tcattagaaattgacascaagacctttatcaga

SEQ ID NO: 3850 - DNA, 33 bp, homo sapiens
aaagagaagggatgccragagttatagacagag

SEQ ID NO: 3851 - DNA, 33 bp, homo sapiens
ccctgatcgtttctcawctctcctattgaatcc

SEQ ID NO: 3852 - DNA, 33 bp, homo sapiens
attaaatattgctttcraatggaaacgtaattt

SEQ ID NO: 3853 - DNA, 33 bp, homo sapiens
gatggcacatgaaaccyataatataatgcttag

SEQ ID NO: 3854 - DNA, 33 bp, homo sapiens
ctccaagtatattttcrctgatcctggcaatgc

SEQ ID NO: 3855 - DNA, 33 bp, homo sapiens
tctcttctaaggctggraaatattccacttgtg

SEQ ID NO: 3856 - DNA, 33 bp, homo sapiens
aatcttgcccaggtggraacactgagtcacatg

SEQ ID NO: 3857 - DNA, 33 bp, homo sapiens
gctaccttgcaatgtayctgaagagcctcaaat

SEQ ID NO: 3858 - DNA, 33 bp, homo sapiens
actagtcaaaagggtckcaaggcatgcaattct

SEQ ID NO: 3859 - DNA, 33 bp, homo sapiens
cctagaggcaaagagamgactttaggttgctca

SEQ ID NO: 3860 - DNA, 33 bp, homo sapiens
atctgctctctgtttcyaaaatggctccttgtt

SEQ ID NO: 3861 - DNA, 33 bp, homo sapiens
acaattgtgtaatatamgtatggcttccagggg

SEQ ID NO: 3862 - DNA, 33 bp, homo sapiens
tgtccacaaggacagargacatttttaattttg

SEQ ID NO: 3863 - DNA, 33 bp, homo sapiens
gaaaaggatactctgaycctacgtgaaagcaaa

SEQ ID NO: 3864 - DNA, 33 bp, homo sapiens
tatataactccccagaratccctaaccaaactc

SEQ ID NO: 3865 - DNA, 33 bp, homo sapiens
tcctgaagtggggagcrcttattgcgatttcag

SEQ ID NO: 3866 - DNA, 33 bp, homo sapiens
ttaaaggcacaagacarcgtaattcctttatac

SEQ ID NO: 3867 - DNA, 33 bp, homo sapiens
aatttgacatctgatawcttcatgaaaaatatt

SEQ ID NO: 3868 - DNA, 33 bp, homo sapiens
aaacaatctaatatcayggttctgtgctctgct

SEQ ID NO: 3869 - DNA, 33 bp, homo sapiens
gggggtgaccagattaygagtgatttgaaatcc

SEQ ID NO: 3870 - DNA, 33 bp, homo sapiens
ctctttattctgggtakagttaacagttatgag

SEQ ID NO: 3871 - DNA, 33 bp, homo sapiens
gttgcatgtgggattasgcttctaacatgtttt

SEQ ID NO: 3872 - DNA, 33 bp, homo sapiens
gtggtgtcgtttcatayggtttaatattacaag

SEQ ID NO: 3873 - DNA, 33 bp, homo sapiens
actggaaagctagggamaatacaaactttgggg

SEQ ID NO: 3874 - DNA, 33 bp, homo sapiens
tgtgacaaacccaaaawtctcacaatgattaca

SEQ ID NO: 3875 - DNA, 33 bp, homo sapiens
gacaggagattgaaaaygcaaactgcttgagaa

SEQ ID NO: 3876 - DNA, 33 bp, homo sapiens
ccctcactatggtctgmaagtttatatttcccc

SEQ ID NO: 3877 - DNA, 33 bp, homo sapiens
acactgcaatttctcaytcgtaagtgggcatta

SEQ ID NO: 3878 - DNA, 33 bp, homo sapiens
aggcctgttatttccayctctcaattacttctc

SEQ ID NO: 3879 - DNA, 33 bp, homo sapiens
tataatttttctaggarccatctacaatagaga

SEQ ID NO: 3880 - DNA, 33 bp, homo sapiens
tatgtactctttgaccrgaaatcttccttctag

SEQ ID NO: 3881 - DNA, 33 bp, homo sapiens
atgaataattttagcayggttttcatatgtact

SEQ ID NO: 3882 - DNA, 33 bp, homo sapiens
attcatgagctttggcyaatgtgtacagtaatc

SEQ ID NO: 3883 - DNA, 33 bp, homo sapiens
tatattctctggtaacrggtgcaatacatgata

SEQ ID NO: 3884 - DNA, 33 bp, homo sapiens
tcaccataaaaggaaasttcttagatctgcatt

SEQ ID NO: 3885 - DNA, 33 bp, homo sapiens
tcacttccactcaatcraaaccatccattgttg

SEQ ID NO: 3886 - DNA, 33 bp, homo sapiens
ggaaaaaacatgagaakcaaagctgaagtcaga

SEQ ID NO: 3887 - DNA, 33 bp, homo sapiens
atcctcgtaactgtatraggtgagttctcttat

SEQ ID NO: 3888 - DNA, 33 bp, homo sapiens
ctgtatcacattttatwacccagcctcagacat

SEQ ID NO: 3889 - DNA, 33 bp, homo sapiens
gcaggtggcccaaatcygaactgccataaagtt

SEQ ID NO: 3890 - DNA, 33 bp, homo sapiens
gtgttgtaatagccaaygtgtgaatttaaatgt

SEQ ID NO: 3891 - DNA, 33 bp, homo sapiens
aagctgtccttcaaacwctacagtctgatttct

SEQ ID NO: 3892 - DNA, 33 bp, homo sapiens
ggtggctcagggcaccraaagagagcgttccag

SEQ ID NO: 3893 - DNA, 33 bp, homo sapiens
tcctacatgggcaccartccaagaggtaagcat

SEQ ID NO: 3894 - DNA, 33 bp, homo sapiens
tccactgttgtttctcragatcatgctcatgcc

SEQ ID NO: 3895 - DNA, 33 bp, homo sapiens
cattttactgtacctamgttacttgtgtgtgtg

SEQ ID NO: 3896 - DNA, 33 bp, homo sapiens
ctcaaccaccccgactsagatcatctttcatct

SEQ ID NO: 3897 - DNA, 33 bp, homo sapiens
ctctaaatctggcttartaacatgaccagatta

SEQ ID NO: 3898 - DNA, 33 bp, homo sapiens
tgcttccggtccgcgakccctgagagctaactt

SEQ ID NO: 3899 - DNA, 33 bp, homo sapiens
ctgttcttgcagaatcraccctttcttacactg

SEQ ID NO: 3900 - DNA, 33 bp, homo sapiens
tatgcctaaaagtgcaygatttccatcagagaa

SEQ ID NO: 3901 - DNA, 33 bp, homo sapiens
agaaaccaaaagacatsaagtggttattttata

SEQ ID NO: 3902 - DNA, 33 bp, homo sapiens
atacatacattttttasctgcagtgttggacag

SEQ ID NO: 3903 - DNA, 33 bp, homo sapiens
ctcaacaaaattataamgtccactatgttaatt

SEQ ID NO: 3904 - DNA, 33 bp, homo sapiens
actttctcaaggtcaarttaattccaaagacat

SEQ ID NO: 3905 - DNA, 33 bp, homo sapiens
cattaataatcctccaracatctcatgttacaa

SEQ ID NO: 3906 - DNA, 33 bp, homo sapiens
taaagaattttaatagwcgtgtactccccattc

SEQ ID NO: 3907 - DNA, 33 bp, homo sapiens
atacataattcttgtasagccttatttgttcaa

SEQ ID NO: 3908 - DNA, 33 bp, homo sapiens
agtctattcacatccartatagtacagtgattt

SEQ ID NO: 3909 - DNA, 33 bp, homo sapiens
atgtttgaaattttccrcaataacgagttgcat

SEQ ID NO: 3910 - DNA, 33 bp, homo sapiens
acccaaatgcctttcayggccaacaaagcctcc

SEQ ID NO: 3911 - DNA, 33 bp, homo sapiens
agatttatagttagcargccaatttggttggcc

SEQ ID NO: 3912 - DNA, 33 bp, homo sapiens
cactaagttatttaacrcaagttttctggttca

SEQ ID NO: 3913 - DNA, 33 bp, homo sapiens
tgttgtgggttagcaayggctatctggaccagt

SEQ ID NO: 3914 - DNA, 33 bp, homo sapiens
gaaaatcagggaggacrcagggtacgaaaagga

SEQ ID NO: 3915 - DNA, 33 bp, homo sapiens
ctgcagagaaatgttaygagccttgtaaaacaa

SEQ ID NO: 3916 - DNA, 33 bp, homo sapiens
gtaaatatagtgtagayagtgaaagctgagttt

SEQ ID NO: 3917 - DNA, 33 bp, homo sapiens
gcttgcaaagaaaaccraacagttccatagagc

SEQ ID NO: 3918 - DNA, 33 bp, homo sapiens
aatctccactaaatackaatgactgcttatagt

SEQ ID NO: 3919 - DNA, 33 bp, homo sapiens
tatttagtggagattawcttttaaaggtgccta

SEQ ID NO: 3920 - DNA, 33 bp, homo sapiens
attgaaaattggtgtaygcagataacaaaaatg

SEQ ID NO: 3921 - DNA, 33 bp, homo sapiens
atatacatgtagtatgracaagacttccgtatc

SEQ ID NO: 3922 - DNA, 33 bp, homo sapiens
gtagatgattttcatarctattctaagagctac

SEQ ID NO: 3923 - DNA, 33 bp, homo sapiens
tactatgtgcaatacartgtagctggaatatag

SEQ ID NO: 3924 - DNA, 33 bp, homo sapiens
gaaaaatctgtattatsaggaaacaccaccaaa

SEQ ID NO: 3925 - DNA, 33 bp, homo sapiens
actgatggaggaaagartagtccttgaagtaga

SEQ ID NO: 3926 - DNA, 33 bp, homo sapiens
ctttcacggtgtgctcraagagtaaacactggg

SEQ ID NO: 3927 - DNA, 33 bp, homo sapiens
taattgaactaggttgmattgccttgaagactt

SEQ ID NO: 3928 - DNA, 33 bp, homo sapiens
tgtcatggcaatataarcattttttcaaaattt

SEQ ID NO: 3929 - DNA, 33 bp, homo sapiens
ccatcaagacagacaamtcaacaatactaagga

SEQ ID NO: 3930 - DNA, 33 bp, homo sapiens
tcaaaaataaattgacygcccatgcatggatct

SEQ ID NO: 3931 - DNA, 33 bp, homo sapiens
tgtacaactcttcaaaygtacgatcttatccca

SEQ ID NO: 3932 - DNA, 33 bp, homo sapiens
atgcataatatcatccmaaattcaatatgttca

SEQ ID NO: 3933 - DNA, 33 bp, homo sapiens
aagcacttacacgaagrcatgggaaacctggga

SEQ ID NO: 3934 - DNA, 33 bp, homo sapiens
attttcaagccaaagawtatcaagcatgacaaa

SEQ ID NO: 3935 - DNA, 33 bp, homo sapiens
atgctgttgtaaacgayctctgagtcataaaat

SEQ ID NO: 3936 - DNA, 33 bp, homo sapiens
cacttcaagcatgaaayagttgaattgatatag

SEQ ID NO: 3937 - DNA, 33 bp, homo sapiens
tcataccaatatgaaartcctccgctgtctcaa

SEQ ID NO: 3938 - DNA, 33 bp, homo sapiens
caagattgcttcatackcctactatacactctc

SEQ ID NO: 3939 - DNA, 33 bp, homo sapiens
ttaagaaaagcataaartagcatggcccctcat

SEQ ID NO: 3940 - DNA, 33 bp, homo sapiens
tactctaatgtgttggyagtccatatacataca

SEQ ID NO: 3941 - DNA, 33 bp, homo sapiens
cctgtcacttgtaagawtacataaatgtgtctt

SEQ ID NO: 3942 - DNA, 33 bp, homo sapiens
ctaccatttactatgargtattcaagaagtcag

SEQ ID NO: 3943 - DNA, 33 bp, homo sapiens
caaagccaaattcttakaatgacctacacagca

SEQ ID NO: 3944 - DNA, 33 bp, homo sapiens
ttatatagctggcaaamactggggaaggattaa

SEQ ID NO: 3945 - DNA, 33 bp, homo sapiens
atgcacaaatgttcaayagtcacaaaaaaataa

SEQ ID NO: 3946 - DNA, 33 bp, homo sapiens
agtgtaaagtgcaggcygaattttgaaaactta

SEQ ID NO: 3947 - DNA, 33 bp, homo sapiens
ctagatgtttctgttaygtcaatcagtaaattc

SEQ ID NO: 3948 - DNA, 33 bp, homo sapiens
tttgaaaaagcctgagycataaagtccaggaat

SEQ ID NO: 3949 - DNA, 33 bp, homo sapiens
tatatcagagttcctcrataatccacgtaaatt

SEQ ID NO: 3950 - DNA, 33 bp, homo sapiens
gatctatagtctctcamagaatgactgtaatat

SEQ ID NO: 3951 - DNA, 33 bp, homo sapiens
acctatttccattcacmaataaagaaatacata

SEQ ID NO: 3952 - DNA, 33 bp, homo sapiens
gaggaagaggaaacaastaggaacaattcctag

SEQ ID NO: 3953 - DNA, 33 bp, homo sapiens
ataatgcatatttctcygacttcattcattccc

SEQ ID NO: 3954 - DNA, 33 bp, homo sapiens
tcactgtcacaagaacrgtatggaaaagacctg

SEQ ID NO: 3955 - DNA, 33 bp, homo sapiens
aaaaagaaacagaaagsaatggacttaatctgt

SEQ ID NO: 3956 - DNA, 33 bp, homo sapiens
aaaccatagtgagccamaagaataaagcactgg

SEQ ID NO: 3957 - DNA, 33 bp, homo sapiens
atagaaacaataatcaraggcaaaatttcctgt

SEQ ID NO: 3958 - DNA, 33 bp, homo sapiens
tgcataatgttaggcayagaacagttacccaat

SEQ ID NO: 3959 - DNA, 33 bp, homo sapiens
atatatgttcattgtcragtatcagaaaatata

SEQ ID NO: 3960 - DNA, 33 bp, homo sapiens
agtattaacttctttayacatttgcagcctggc

SEQ ID NO: 3961 - DNA, 33 bp, homo sapiens
agttgcaggtgaagacraagtagacaatttgaa

SEQ ID NO: 3962 - DNA, 33 bp, homo sapiens
ataataaataaggaaaygagccaaaacaatacc

SEQ ID NO: 3963 - DNA, 33 bp, homo sapiens
atgaattgtgtgagaaycaaaacaaaggaatta

SEQ ID NO: 3964 - DNA, 33 bp, homo sapiens
tcttctaaaaataagcrccatggatccagggac

SEQ ID NO: 3965 - DNA, 33 bp, homo sapiens
attgttagagattccartgaaggattatttcac

SEQ ID NO: 3966 - DNA, 33 bp, homo sapiens
atacagagagactgaasaaattatgaacaaatt

SEQ ID NO: 3967 - DNA, 33 bp, homo sapiens
atttgctgctcatatcmattcagcattggtcat

SEQ ID NO: 3968 - DNA, 33 bp, homo sapiens
atttactcttcctagaytccaaaggtgatattt

SEQ ID NO: 3969 - DNA, 33 bp, homo sapiens
tagaaggagagtgataytagtacctagcgctta

SEQ ID NO: 3970 - DNA, 33 bp, homo sapiens
gatgctttattacagcrgaatagactgaggagt

SEQ ID NO: 3971 - DNA, 33 bp, homo sapiens
ccagtttgtaaattggmaagcgctggaaagctg

SEQ ID NO: 3972 - DNA, 33 bp, homo sapiens
gtttgtaattgatgacrctgagtatacagcgat

SEQ ID NO: 3973 - DNA, 33 bp, homo sapiens
gttgtgaatagcgctamaatgaatatacacatg

SEQ ID NO: 3974 - DNA, 33 bp, homo sapiens
ctgaggtcttctgcaargtaaccaacccatgtc

SEQ ID NO: 3975 - DNA, 33 bp, homo sapiens
tagaggataaaggtaaycgacccgtcttggttg

SEQ ID NO: 3976 - DNA, 33 bp, homo sapiens
acaactgacataatgargtcagctgttgaacac

SEQ ID NO: 3977 - DNA, 33 bp, homo sapiens
agggccagactatgaaygtgggattggtagcaa

SEQ ID NO: 3978 - DNA, 33 bp, homo sapiens
aatgtggtctatgttcmaagtagagcattccct

SEQ ID NO: 3979 - DNA, 33 bp, homo sapiens
aagtaaaacgcagaaasaaccaataggtctgct

SEQ ID NO: 3980 - DNA, 33 bp, homo sapiens
tggtgggggaagagacractttctcaccaggtc

SEQ ID NO: 3981 - DNA, 33 bp, homo sapiens
tatggattgtgtattcyatgcaggctctattag

SEQ ID NO: 3982 - DNA, 33 bp, homo sapiens
taaaccaggtttttctsactctagagaccatgt

SEQ ID NO: 3983 - DNA, 33 bp, homo sapiens
ccaagaatctcaaaatragctgataaataattg

SEQ ID NO: 3984 - DNA, 33 bp, homo sapiens
ttaagcaaaagaggccrgactctatgattttat

SEQ ID NO: 3985 - DNA, 33 bp, homo sapiens
gctcaaattcttaagaratgctttgggatgtgg

SEQ ID NO: 3986 - DNA, 33 bp, homo sapiens
gagatatgttttgtgaygagatctttatagtcg

SEQ ID NO: 3987 - DNA, 33 bp, homo sapiens
gcaatcagtgttatgcyctgttttatgcttgac

SEQ ID NO: 3988 - DNA, 33 bp, homo sapiens
taatcatatactgctarcattttaaacattcac

SEQ ID NO: 3989 - DNA, 33 bp, homo sapiens
accattttgccattcaracattgcctctctaca

SEQ ID NO: 3990 - DNA, 33 bp, homo sapiens
ggagcaaacaagggacratcagcagcttcttgc

SEQ ID NO: 3991 - DNA, 33 bp, homo sapiens
attttcctggccttccratttttcaccagtgaa

SEQ ID NO: 3992 - DNA, 33 bp, homo sapiens
aaccaccagaatgaatraagtcaatcaggaaaa

SEQ ID NO: 3993 - DNA, 33 bp, homo sapiens
aaactagggtgctaccrggaaaacatcatctta

SEQ ID NO: 3994 - DNA, 33 bp, homo sapiens
ggctgcttaaccaatayattaggtggtagtgga

SEQ ID NO: 3995 - DNA, 33 bp, homo sapiens
attggaaacacaatccraaagataaccaaaaaa

SEQ ID NO: 3996 - DNA, 33 bp, homo sapiens
gaatgataatccactgwatgcatataacacaat

SEQ ID NO: 3997 - DNA, 33 bp, homo sapiens
tcttttgaatagagacraaggcagattagccct

SEQ ID NO: 3998 - DNA, 33 bp, homo sapiens
ttgtccaaactgtaagraagataatatctccta

SEQ ID NO: 3999 - DNA, 33 bp, homo sapiens
attctaaatgaaagcaraactctagaaatttaa

SEQ ID NO: 4000 - DNA, 33 bp, homo sapiens
gaacttgataaataggkaccaaggaataccatg

SEQ ID NO: 4001 - DNA, 33 bp, homo sapiens
atggttcctttgagaasgtcttttttctaacgg

SEQ ID NO: 4002 - DNA, 33 bp, homo sapiens
ggactgttttaaatcaygggccaggaattatac

SEQ ID NO: 4003 - DNA, 33 bp, homo sapiens
ttaaggaggaaatcaarctattcattgcgtgca

SEQ ID NO: 4004 - DNA, 33 bp, homo sapiens
acacactgcttgacaamtaacttaaccaaaaaa

SEQ ID NO: 4005 - DNA, 33 bp, homo sapiens
aaaggaagtccagttcragtgttcagatgatgg

SEQ ID NO: 4006 - DNA, 33 bp, homo sapiens
ctggaagttgctttggwaattgctcccagctgg

SEQ ID NO: 4007 - DNA, 33 bp, homo sapiens
tgtacctatcccaaacycttgtgtgtactctaa

SEQ ID NO: 4008 - DNA, 33 bp, homo sapiens
aatttggctttcaaagratgtagattcacaagt

SEQ ID NO: 4009 - DNA, 33 bp, homo sapiens
attatagctggtttaamtagtaagaaaatgtat

SEQ ID NO: 4010 - DNA, 33 bp, homo sapiens
aattgcataatacatcwcatttacttgataagc

SEQ ID NO: 4011 - DNA, 33 bp, homo sapiens
aataaagagaaacaaayagtcttgaccagaggg

SEQ ID NO: 4012 - DNA, 33 bp, homo sapiens
gtaaaaagcatctcacygaggtaaaaaacgttt

SEQ ID NO: 4013 - DNA, 33 bp, homo sapiens
atggaaaaccaccaagrcagaacactgttagac

SEQ ID NO: 4014 - DNA, 33 bp, homo sapiens
atgtagtaggctttccygctatttcacttctag

SEQ ID NO: 4015 - DNA, 33 bp, homo sapiens
gtgataattgtgttaaytgtagaaattgattgt

SEQ ID NO: 4016 - DNA, 33 bp, homo sapiens
gaaaataatcaatacartgatatacacggaaac

SEQ ID NO: 4017 - DNA, 33 bp, homo sapiens
ttgctggccatttataytagcctgtgacttgtc

SEQ ID NO: 4018 - DNA, 33 bp, homo sapiens
atctgtgtaataaaatsatagcgcaggaaattg

SEQ ID NO: 4019 - DNA, 33 bp, homo sapiens
atagggaggacttggtkaagagaaaaggaagaa

SEQ ID NO: 4020 - DNA, 33 bp, homo sapiens
ctttatggaacatcctsacttccacacctcctt

SEQ ID NO: 4021 - DNA, 33 bp, homo sapiens
attttaagctttgttargaaatgcctagaatac

SEQ ID NO: 4022 - DNA, 33 bp, homo sapiens
gttttctcagttgaaaygagtctcctaaaggaa

SEQ ID NO: 4023 - DNA, 33 bp, homo sapiens
atgatggataggcagayggagtttgattacatg

SEQ ID NO: 4024 - DNA, 33 bp, homo sapiens
aaggtgatccacagtarcagaaggcacaaaaac

SEQ ID NO: 4025 - DNA, 33 bp, homo sapiens
tgttttacataaaagakcaacctcaatattgac

SEQ ID NO: 4026 - DNA, 33 bp, homo sapiens
gacacttgatttggcaragaacgttgcttagag

SEQ ID NO: 4027 - DNA, 33 bp, homo sapiens
attatcatggaaggaamtatgatataaccaatt

SEQ ID NO: 4028 - DNA, 33 bp, homo sapiens
agttaaatgaaaggtawaagttctatcattcaa

SEQ ID NO: 4029 - DNA, 33 bp, homo sapiens
gcttttgatgaggaaastaataaagacataaaa

SEQ ID NO: 4030 - DNA, 33 bp, homo sapiens
gtgctgactttgtatgyaggtatctataacaat

SEQ ID NO: 4031 - DNA, 33 bp, homo sapiens
cattacattacattcayaaggacagtgagtgaa

SEQ ID NO: 4032 - DNA, 33 bp, homo sapiens
atacatcctttgtgtcractagaggaaaagtaa

SEQ ID NO: 4033 - DNA, 33 bp, homo sapiens
gatgcagcctgaaccayctaatcttcaggattt

SEQ ID NO: 4034 - DNA, 33 bp, homo sapiens
ataaatgcatggaaaayggtctgaagggattca

SEQ ID NO: 4035 - DNA, 33 bp, homo sapiens
tgaaacagcatcacgartaatacaaacaacatc

SEQ ID NO: 4036 - DNA, 33 bp, homo sapiens
acttgtcttcgggtatsaagctgctgcttattt

SEQ ID NO: 4037 - DNA, 33 bp, homo sapiens
cggcaggagtccacaamgtgctgtgaggactga

SEQ ID NO: 4038 - DNA, 33 bp, homo sapiens
ccacttcactatacaawcttttgtcctgaatat

SEQ ID NO: 4039 - DNA, 33 bp, homo sapiens
attgaaaagcatagacmaaaatttatgaagtaa

SEQ ID NO: 4040 - DNA, 33 bp, homo sapiens
tgagtaaaactggtaastgctagtgacttcaat

SEQ ID NO: 4041 - DNA, 33 bp, homo sapiens
actgtcatctgtttacygcatagtctactgaat

SEQ ID NO: 4042 - DNA, 33 bp, homo sapiens
tgagtgatagggtcagragaacacttactttca

SEQ ID NO: 4043 - DNA, 33 bp, homo sapiens
gtcactgctttctgcargttttgactgtggaaa

SEQ ID NO: 4044 - DNA, 33 bp, homo sapiens
ttgtcattgctttgtaygtgtgaataaacttta

SEQ ID NO: 4045 - DNA, 33 bp, homo sapiens
attgattggacatagarggtaatggagagaaga

SEQ ID NO: 4046 - DNA, 33 bp, homo sapiens
taatttcaggtttgacraaatgtaacaaatcaa

SEQ ID NO: 4047 - DNA, 33 bp, homo sapiens
ctcaaatcttccttccyacatccttaaaaatct

SEQ ID NO: 4048 - DNA, 33 bp, homo sapiens
agagccgtataagaaartcaaagtccttatcag

SEQ ID NO: 4049 - DNA, 33 bp, homo sapiens
cagaccctgaactcaaygtgtcggctggagcca

SEQ ID NO: 4050 - DNA, 33 bp, homo sapiens
tataggcctctgtaaamagaaaaatatggctgt

SEQ ID NO: 4051 - DNA, 33 bp, homo sapiens
atgttattcacggaaargctactaaaaattttg

SEQ ID NO: 4052 - DNA, 33 bp, homo sapiens
gtagacaaattccagtracattacaattacaat

SEQ ID NO: 4053 - DNA, 33 bp, homo sapiens
agccagggctacgcaaytaatatagagaaaaat

SEQ ID NO: 4054 - DNA, 33 bp, homo sapiens
tagatatctgagcagaraaatgatcatttaccc

SEQ ID NO: 4055 - DNA, 33 bp, homo sapiens
gggtattagggcatcaygggtttttttgggagg

SEQ ID NO: 4056 - DNA, 33 bp, homo sapiens
gaagacagggaaaaatyactgaaaaataagtga

SEQ ID NO: 4057 - DNA, 33 bp, homo sapiens
tttatcctataggccartatttcagccattgtc

SEQ ID NO: 4058 - DNA, 33 bp, homo sapiens
acaacagctaaacaagycaaccaataaaattaa

SEQ ID NO: 4059 - DNA, 33 bp, homo sapiens
acaaacttattaaaacragcagtggagccaggc

SEQ ID NO: 4060 - DNA, 33 bp, homo sapiens
tgcaaagcagttcactyaagatggccacctagt

SEQ ID NO: 4061 - DNA, 33 bp, homo sapiens
ttgtgctgaggctcaayaaatgacaagaagctt

SEQ ID NO: 4062 - DNA, 33 bp, homo sapiens
ttacttgcaggcaacartggtctaaaaatatta

SEQ ID NO: 4063 - DNA, 33 bp, homo sapiens
atacccaaacctctacmactcataaagattgta

SEQ ID NO: 4064 - DNA, 33 bp, homo sapiens
ctgagccctgagcagtraaactctggtaaatga

SEQ ID NO: 4065 - DNA, 33 bp, homo sapiens
cttctacacaatttagragaccaatgtatttat

SEQ ID NO: 4066 - DNA, 33 bp, homo sapiens
ccaagtctgagacaaamtcggaaaattatctta

SEQ ID NO: 4067 - DNA, 33 bp, homo sapiens
aatcatagaagaatgcrcagtatcaatagacac

SEQ ID NO: 4068 - DNA, 33 bp, homo sapiens
gtctgtcaactgcctckgaaggagtaatagcct

SEQ ID NO: 4069 - DNA, 33 bp, homo sapiens
atttactgagaatctayaatgtgctgaatgcta

SEQ ID NO: 4070 - DNA, 33 bp, homo sapiens
gctacactccaaattarcagcacttattgagag

SEQ ID NO: 4071 - DNA, 33 bp, homo sapiens
tggatttttagtttcawagtatatcttgcctaa

SEQ ID NO: 4072 - DNA, 33 bp, homo sapiens
ctaatagtaatatagaygatcgagtttactggc

SEQ ID NO: 4073 - DNA, 33 bp, homo sapiens
atattggaaataataayctattagcaggctatc

SEQ ID NO: 4074 - DNA, 33 bp, homo sapiens
ttgcttctcaatatcayggattggtttcaattg

SEQ ID NO: 4075 - DNA, 33 bp, homo sapiens
tgtgcagagttcctcaygaagtaagttatttta

SEQ ID NO: 4076 - DNA, 33 bp, homo sapiens
tggttgctgcacaggamtagcccctggtattag

SEQ ID NO: 4077 - DNA, 33 bp, homo sapiens
tcaactgtgccagccartacctgttccttccca

SEQ ID NO: 4078 - DNA, 33 bp, homo sapiens
caatttgttactcagakaatttccagagacatt

SEQ ID NO: 4079 - DNA, 33 bp, homo sapiens
aatgatgcatgtaatgrattagagttgaagata

SEQ ID NO: 4080 - DNA, 33 bp, homo sapiens
ctcgcataacccaaaayggaatcacaagtttaa

SEQ ID NO: 4081 - DNA, 33 bp, homo sapiens
cagattcccatagaaasgcaaaccgtattgtga

SEQ ID NO: 4082 - DNA, 33 bp, homo sapiens
ttacacattaacccagmaaaagtccactgaaac

SEQ ID NO: 4083 - DNA, 33 bp, homo sapiens
atttccaatactaaacygtgcctagtatgtaat

SEQ ID NO: 4084 - DNA, 33 bp, homo sapiens
ttcaatccagctctaaracactgaaaacaattt

SEQ ID NO: 4085 - DNA, 33 bp, homo sapiens
aaaaattacttcaaaayggatcattgtcttaaa

SEQ ID NO: 4086 - DNA, 33 bp, homo sapiens
acatctgcccattgccragttccagagttgctt

SEQ ID NO: 4087 - DNA, 33 bp, homo sapiens
tagttagttattacacrgcaagtttctctcata

SEQ ID NO: 4088 - DNA, 33 bp, homo sapiens
tatgttgttggcaaaaytttatggttcttcacg

SEQ ID NO: 4089 - DNA, 33 bp, homo sapiens
tctgaagtaacctgacracttagtgaataacaa

SEQ ID NO: 4090 - DNA, 33 bp, homo sapiens
ctcaaagagtatgcaayggtataatttaacttt

SEQ ID NO: 4091 - DNA, 33 bp, homo sapiens
atctccagcttttgcarcagtaatcttgacctc

SEQ ID NO: 4092 - DNA, 33 bp, homo sapiens
gtttatgcactaataayagcaattgaaggcatt

SEQ ID NO: 4093 - DNA, 33 bp, homo sapiens
gacaattttaaatcaayggtgagtatttgggta

SEQ ID NO: 4094 - DNA, 33 bp, homo sapiens
accatgcaattctggargcatatttttcccaag

SEQ ID NO: 4095 - DNA, 33 bp, homo sapiens
cataataattgtctcayagacattctcgttcta

SEQ ID NO: 4096 - DNA, 33 bp, homo sapiens
ccacgttccaatccaaratatgaaacctccccc

SEQ ID NO: 4097 - DNA, 33 bp, homo sapiens
actggcactcaaatcgrccttgatttttcggcc

SEQ ID NO: 4098 - DNA, 33 bp, homo sapiens
tattttgattgggagakgttttataggaaatgt

SEQ ID NO: 4099 - DNA, 33 bp, homo sapiens
cagttcctttgataagrcctgatgtttacatag

SEQ ID NO: 4100 - DNA, 33 bp, homo sapiens
gacttgtggaactagakgctgaaaagagtcaga

SEQ ID NO: 4101 - DNA, 33 bp, homo sapiens
ctataaaatgagcatartaatacctgcatctca

SEQ ID NO: 4102 - DNA, 33 bp, homo sapiens
acaattttctcaaacargtaaagggataacaat

SEQ ID NO: 4103 - DNA, 33 bp, homo sapiens
gcaaaagtcaaggagcwactaagattgtgctat

SEQ ID NO: 4104 - DNA, 33 bp, homo sapiens
cttttttagaatcttaygtgcacctgacattca

SEQ ID NO: 4105 - DNA, 33 bp, homo sapiens
ggtatttactgaagccrgaatacactgatgata

SEQ ID NO: 4106 - DNA, 33 bp, homo sapiens
tgtataggttcaggacycctaaaaaatgtgata

SEQ ID NO: 4107 - DNA, 33 bp, homo sapiens
gtcaagtctccaataaktgatagaggacaccag

SEQ ID NO: 4108 - DNA, 33 bp, homo sapiens
tttaaattacacaaaargtttacctccaacatt

SEQ ID NO: 4109 - DNA, 33 bp, homo sapiens
catttacttcaagaaaytataccaactttaccc

SEQ ID NO: 4110 - DNA, 33 bp, homo sapiens
ttattttgtagcatacsagccgcctctatcttc

SEQ ID NO: 4111 - DNA, 33 bp, homo sapiens
agttacagccgagccaratggtagaaaccttgc

SEQ ID NO: 4112 - DNA, 33 bp, homo sapiens
tcaagtcctgcttccayattttcaaggttttat

SEQ ID NO: 4113 - DNA, 33 bp, homo sapiens
ctcaaaaaaagacagayatgtgggtgacaaagg

SEQ ID NO: 4114 - DNA, 33 bp, homo sapiens
tttttgtaggagtcaarttagcccaaattcttt

SEQ ID NO: 4115 - DNA, 33 bp, homo sapiens
agatgcaaaatgaagcrgaacacacatggcctc

SEQ ID NO: 4116 - DNA, 33 bp, homo sapiens
tgtatcatactatacaraaatgaaataaccatg

SEQ ID NO: 4117 - DNA, 33 bp, homo sapiens
acatatttccttctaaycggactataactgggt

SEQ ID NO: 4118 - DNA, 33 bp, homo sapiens
tccccaaccattggacsctacagtcacaggacc

SEQ ID NO: 4119 - DNA, 33 bp, homo sapiens
ctatatgctagatactsaagaatgagaacgaca

SEQ ID NO: 4120 - DNA, 33 bp, homo sapiens
tggccataaactttacrcatttctacagcaaag

SEQ ID NO: 4121 - DNA, 33 bp, homo sapiens
actgaaccgtgttccaygtcacgaatagaaaat

SEQ ID NO: 4122 - DNA, 33 bp, homo sapiens
gactctgggagtgaaaygcactgggaatgacat

SEQ ID NO: 4123 - DNA, 33 bp, homo sapiens
tctatgttgatgtcaayctcaaattgtgagggc

SEQ ID NO: 4124 - DNA, 33 bp, homo sapiens
actgcagacaggtggayatggtaattacggagg

SEQ ID NO: 4125 - DNA, 33 bp, homo sapiens
tgcttgtcaactggagkaaagagtagagttccc

SEQ ID NO: 4126 - DNA, 33 bp, homo sapiens
aaagcactcaaggaaaygggaatagcttgagta

SEQ ID NO: 4127 - DNA, 33 bp, homo sapiens
ggctagtgatcagttayagagcaaaattgctaa

SEQ ID NO: 4128 - DNA, 33 bp, homo sapiens
tgtgattttgttcaagyagggctcagctgagtg

SEQ ID NO: 4129 - DNA, 33 bp, homo sapiens
ttattcatcttgcatamctatgactttatacct

SEQ ID NO: 4130 - DNA, 33 bp, homo sapiens
agttcaggaaacatgaygtcaaagttgctacga

SEQ ID NO: 4131 - DNA, 33 bp, homo sapiens
agggtatagtaatctamgttgcaggagaaaagg

SEQ ID NO: 4132 - DNA, 33 bp, homo sapiens
caggatggccaaataaraagtctcaatttggaa

SEQ ID NO: 4133 - DNA, 33 bp, homo sapiens
aaaattgacattttcamgcaaagatagaaggga

SEQ ID NO: 4134 - DNA, 33 bp, homo sapiens
cttctatgaacagtaartaagcattaaatccca

SEQ ID NO: 4135 - DNA, 33 bp, homo sapiens
aagaggtgacagacaaygcagatatctgggcac

SEQ ID NO: 4136 - DNA, 33 bp, homo sapiens
ctctgtagcccaaggayagaaaattgcaactgc

SEQ ID NO: 4137 - DNA, 33 bp, homo sapiens
ttttagcgcttatcacwgtagacatttacattt

SEQ ID NO: 4138 - DNA, 33 bp, homo sapiens
ttaactttatgtagccyaaatggattttggtct

SEQ ID NO: 4139 - DNA, 33 bp, homo sapiens
tgttacctgagctgccratgggttggtcctaag

SEQ ID NO: 4140 - DNA, 33 bp, homo sapiens
ccaatgaaaggagggcygaaacaacaaaaggca

SEQ ID NO: 4141 - DNA, 33 bp, homo sapiens
ttgaaggaggtgagaargtgaaaccaaaaattt

SEQ ID NO: 4142 - DNA, 33 bp, homo sapiens
gcaagttggactctaarggcctgttccgagact

SEQ ID NO: 4143 - DNA, 33 bp, homo sapiens
tttctcaatggtagtaratcatcaacttttgag

SEQ ID NO: 4144 - DNA, 33 bp, homo sapiens
gatatggctctcaaacygaaaacaagttaaaaa

SEQ ID NO: 4145 - DNA, 33 bp, homo sapiens
tctattacagtattgarcctttagaccaaaaat

SEQ ID NO: 4146 - DNA, 33 bp, homo sapiens
caaacgtgcacatctaycccatgaatctcaaat

SEQ ID NO: 4147 - DNA, 33 bp, homo sapiens
ctgcctaataaactccsacatctctgtgaagtc

SEQ ID NO: 4148 - DNA, 33 bp, homo sapiens
gatcaattgctaagacyagtgctatgcttatag

SEQ ID NO: 4149 - DNA, 33 bp, homo sapiens
agagatgaaatcattayacaggtggagaaaatt

SEQ ID NO: 4150 - DNA, 33 bp, homo sapiens
tggaacagagcatttargaggtgataataagga

SEQ ID NO: 4151 - DNA, 33 bp, homo sapiens
gaaattcaacaataacraacaatctttcaacca

SEQ ID NO: 4152 - DNA, 33 bp, homo sapiens
aaagggcataaaacackaaaggcattaattgtc

SEQ ID NO: 4153 - DNA, 33 bp, homo sapiens
aactgagctttgtctayggaggcagactgatgt

SEQ ID NO: 4154 - DNA, 33 bp, homo sapiens
attatgttgtctttaartgatcttcaataatgt

SEQ ID NO: 4155 - DNA, 33 bp, homo sapiens
gttcaacttgctagaarctttgtcttacttctc

SEQ ID NO: 4156 - DNA, 33 bp, homo sapiens
ggctgaaatcaccttargaagcattatgaaaca

SEQ ID NO: 4157 - DNA, 33 bp, homo sapiens
accgtgccctcccttgyagctctctgttggcta

SEQ ID NO: 4158 - DNA, 33 bp, homo sapiens
ttgttttgttaatcacyacacatttaatgcctg

SEQ ID NO: 4159 - DNA, 33 bp, homo sapiens
tgttaaccatcatctawcatactaacataaaaa

SEQ ID NO: 4160 - DNA, 33 bp, homo sapiens
tctctcttctcctttaygctgtgaacatcttgt

SEQ ID NO: 4161 - DNA, 33 bp, homo sapiens
taactataagtgagaaycgctgtccccattgga

SEQ ID NO: 4162 - DNA, 33 bp, homo sapiens
acccaattggcctgcaygagaataggacttttc

SEQ ID NO: 4163 - DNA, 33 bp, homo sapiens
cccactctggtgtttayggccttgtgttgcatg

SEQ ID NO: 4164 - DNA, 33 bp, homo sapiens
ctagcgtcgtggaagcrccgtaatgtcccgaag

SEQ ID NO: 4165 - DNA, 33 bp, homo sapiens
tattacttcattgaatkactctttgccattttt

SEQ ID NO: 4166 - DNA, 33 bp, homo sapiens
tactggctcccattgaygctttccaatatggtt

SEQ ID NO: 4167 - DNA, 33 bp, homo sapiens
tacatacacagactctsaaagagattaacagaa

SEQ ID NO: 4168 - DNA, 33 bp, homo sapiens
ttatggaatcaagatgmagctttacagtcagtg

SEQ ID NO: 4169 - DNA, 33 bp, homo sapiens
tgcctctttctgattgyagagctgtgactacat

SEQ ID NO: 4170 - DNA, 33 bp, homo sapiens
agcacactgaaggccarcgtagatacagctgcc

SEQ ID NO: 4171 - DNA, 33 bp, homo sapiens
ctataatctttccccawgtaccaatgttcactt

SEQ ID NO: 4172 - DNA, 33 bp, homo sapiens
tatggtatagttcataytaacagtgctcatcaa

SEQ ID NO: 4173 - DNA, 33 bp, homo sapiens
cagatttaagcccataygtatcaaacattatat

SEQ ID NO: 4174 - DNA, 33 bp, homo sapiens
ctgaaataatgtaacartgtgaggtgtcatgaa

SEQ ID NO: 4175 - DNA, 33 bp, homo sapiens
tccagtgagttccaaasactccattgcacaagt

SEQ ID NO: 4176 - DNA, 33 bp, homo sapiens
ttagtagcctaaatcaycagaacagaattgacc

SEQ ID NO: 4177 - DNA, 33 bp, homo sapiens
aaattgtggaatattasgtatagttgatcctgt

SEQ ID NO: 4178 - DNA, 33 bp, homo sapiens
actctacattggttcaygttcagggaattcctg

SEQ ID NO: 4179 - DNA, 33 bp, homo sapiens
attgccaatacatgaarctaaacatttatattt

SEQ ID NO: 4180 - DNA, 33 bp, homo sapiens
cattatttagtctttcycttaaagtcctccttg

SEQ ID NO: 4181 - DNA, 33 bp, homo sapiens
gatatagaaaaataacsaaaatgatgcgatttg

SEQ ID NO: 4182 - DNA, 33 bp, homo sapiens
tatgctagcctctggaratacaaaggaaagagg

SEQ ID NO: 4183 - DNA, 33 bp, homo sapiens
cctggtaatgaactgcrcataataccaacagca

SEQ ID NO: 4184 - DNA, 33 bp, homo sapiens
gtatttcattatcagtraaaaatatgcctacag

SEQ ID NO: 4185 - DNA, 33 bp, homo sapiens
tttccatagctgtacartgaggatagtagacct

SEQ ID NO: 4186 - DNA, 33 bp, homo sapiens
gtgacaggcacctgtcraaactgatacactgtg

SEQ ID NO: 4187 - DNA, 33 bp, homo sapiens
cttaacattggcaaccygactgtcctgcagcac

SEQ ID NO: 4188 - DNA, 33 bp, homo sapiens
tgatgtgactaagtcaratcaagggaccggaaa

SEQ ID NO: 4189 - DNA, 33 bp, homo sapiens
actgcatctgaagcacrgtaacattctctgtca

SEQ ID NO: 4190 - DNA, 33 bp, homo sapiens
agcgcatcactggggamattatatacttagccc

SEQ ID NO: 4191 - DNA, 33 bp, homo sapiens
gtaagggatgtcacagsctaacatcagtggagg

SEQ ID NO: 4192 - DNA, 33 bp, homo sapiens
tcacaggaatttacacygaagacaaatgccaat

SEQ ID NO: 4193 - DNA, 33 bp, homo sapiens
ctgatctagtcagtaarctcaccaatgtcttct

SEQ ID NO: 4194 - DNA, 33 bp, homo sapiens
gttggatttttattgtyaaggtcactccgagga

SEQ ID NO: 4195 - DNA, 33 bp, homo sapiens
aaaatttgaacttaaaygagtcgttaaatcaat

SEQ ID NO: 4196 - DNA, 33 bp, homo sapiens
tgaagtcaattcagaaygtaagtcatctgatcc

SEQ ID NO: 4197 - DNA, 33 bp, homo sapiens
ctttttttcaatacacraaagctataacaacca

SEQ ID NO: 4198 - DNA, 33 bp, homo sapiens
gttttctttattcttgsaacacctgttaagagg

SEQ ID NO: 4199 - DNA, 33 bp, homo sapiens
atgtagccaaaaatgarcttgataacgttattc

SEQ ID NO: 4200 - DNA, 33 bp, homo sapiens
tttttagtcacaaacamctttacattgcttatc

SEQ ID NO: 4201 - DNA, 33 bp, homo sapiens
attgttgaaataatgargcaactgtgactttca

SEQ ID NO: 4202 - DNA, 33 bp, homo sapiens
gatggcacagcacttayagagaattagaagaag

SEQ ID NO: 4203 - DNA, 33 bp, homo sapiens
agttagtaatgagtgasgtcttgaggaagagat

SEQ ID NO: 4204 - DNA, 33 bp, homo sapiens
gtgagatatctgaggayggagagtgaaagttag

SEQ ID NO: 4205 - DNA, 33 bp, homo sapiens
ttctccagtctggaatracttcttttgggtgca

SEQ ID NO: 4206 - DNA, 33 bp, homo sapiens
gagtaaaaatacaccartgattcttctgtagac

SEQ ID NO: 4207 - DNA, 33 bp, homo sapiens
actgagaggataagcartaggcttgtctttatt

SEQ ID NO: 4208 - DNA, 33 bp, homo sapiens
aatatacattcaatggrcatgaaaaaatgcagc

SEQ ID NO: 4209 - DNA, 33 bp, homo sapiens
cattttaaattcctcaygtagtaagatacagca

SEQ ID NO: 4210 - DNA, 33 bp, homo sapiens
taccttcttaccatcaygctaattcgtatcctt

SEQ ID NO: 4211 - DNA, 33 bp, homo sapiens
aggatcagcttatagargaaatttgcatcaaag

SEQ ID NO: 4212 - DNA, 33 bp, homo sapiens
gtgccgttataaaagaygtgaaaagagctctct

SEQ ID NO: 4213 - DNA, 33 bp, homo sapiens
tgttgactttataattsaacttggtgttttggc

SEQ ID NO: 4214 - DNA, 33 bp, homo sapiens
taattgagattcaaaawgccatatgctacctta

SEQ ID NO: 4215 - DNA, 33 bp, homo sapiens
tacaaagaagttacagyccatatttctcaccta

SEQ ID NO: 4216 - DNA, 33 bp, homo sapiens
ggtaataaaatcatcamctttaatatgggaatg

SEQ ID NO: 4217 - DNA, 33 bp, homo sapiens
aaataactttgaaaaawcaaacacaccatattt

SEQ ID NO: 4218 - DNA, 33 bp, homo sapiens
tggtaagtgaaatgaaygtaaaggtaattgtgt

SEQ ID NO: 4219 - DNA, 33 bp, homo sapiens
gggaaagagtatatcamgttcttagagctgttg

SEQ ID NO: 4220 - DNA, 33 bp, homo sapiens
cttattcccttttcccygcatagctgcccccac

SEQ ID NO: 4221 - DNA, 33 bp, homo sapiens
ctctagccattgtagargtttgggatgggtcag

SEQ ID NO: 4222 - DNA, 33 bp, homo sapiens
atcattctcccctccawacatacactttgaatg

SEQ ID NO: 4223 - DNA, 33 bp, homo sapiens
ggggtatatgagtgagmaagcacaggatccagc

SEQ ID NO: 4224 - DNA, 33 bp, homo sapiens
agagtaataactgggaygataaaaggaagataa

SEQ ID NO: 4225 - DNA, 33 bp, homo sapiens
taagttgatagtgagcrctgaaagctgtggtct

SEQ ID NO: 4226 - DNA, 33 bp, homo sapiens
agaagaatgactactaycacgtttacttagtgt

SEQ ID NO: 4227 - DNA, 33 bp, homo sapiens
atgtgggtggttccaaygacagttcagctttga

SEQ ID NO: 4228 - DNA, 33 bp, homo sapiens
aatttcatcatagtaarcatcttgaaggaagac

SEQ ID NO: 4229 - DNA, 33 bp, homo sapiens
tgcatacattttcactraaacatggtcattcta

SEQ ID NO: 4230 - DNA, 33 bp, homo sapiens
agccttcctatgaacasagtaaacaagcaacct

SEQ ID NO: 4231 - DNA, 33 bp, homo sapiens
gggctcataagaagagsaccatagtgacaagga

SEQ ID NO: 4232 - DNA, 33 bp, homo sapiens
ttcattaaggactacakattctgtgttagagta

SEQ ID NO: 4233 - DNA, 33 bp, homo sapiens
tttttaccatgagtagycccagaaaacaaacca

SEQ ID NO: 4234 - DNA, 33 bp, homo sapiens
tcttaacccggaatccmaagttcttaacaaaat

SEQ ID NO: 4235 - DNA, 33 bp, homo sapiens
ggagcgtttttaacccrctgcatatacacacaa

SEQ ID NO: 4236 - DNA, 33 bp, homo sapiens
aactatagaaattactwactatagctgtgtgtg

SEQ ID NO: 4237 - DNA, 33 bp, homo sapiens
aaggatttaaatgaaayggcagaaaacatgaaa

SEQ ID NO: 4238 - DNA, 33 bp, homo sapiens
ccatgttcagcagaaasgtagggcacttcagag

SEQ ID NO: 4239 - DNA, 33 bp, homo sapiens
cctcagaaatctcaaarcatctgaaataaacac

SEQ ID NO: 4240 - DNA, 33 bp, homo sapiens
ttttttcttgtcataartcctaaatgcagccag

SEQ ID NO: 4241 - DNA, 33 bp, homo sapiens
gtgtatgcagttgaaamatagaggcagcgatat

SEQ ID NO: 4242 - DNA, 33 bp, homo sapiens
tctgctgcataataaarccagaagtctgtggaa

SEQ ID NO: 4243 - DNA, 33 bp, homo sapiens
caaagggaaaattatasattaccgccatggagg

SEQ ID NO: 4244 - DNA, 33 bp, homo sapiens
tcacttctgataccaamtagtctatactgaacc

SEQ ID NO: 4245 - DNA, 33 bp, homo sapiens
tgtaaagaagaatctgyagaaatggcttgatga

SEQ ID NO: 4246 - DNA, 33 bp, homo sapiens
acagttttgaaattacrgctaaataggaagaat

SEQ ID NO: 4247 - DNA, 33 bp, homo sapiens
aatatgcctgagaatgrattaaagtgttaattc

SEQ ID NO: 4248 - DNA, 33 bp, homo sapiens
tcaggaaccatccttamatcacaagcttctaga

SEQ ID NO: 4249 - DNA, 33 bp, homo sapiens
tcttagttgaactaacyacatctgccatgtctt

SEQ ID NO: 4250 - DNA, 33 bp, homo sapiens
ctgagtggagtgaaatratcttgtttggtgcca

SEQ ID NO: 4251 - DNA, 33 bp, homo sapiens
gagaaatttgaggtcaytccaagatgaaggctg

SEQ ID NO: 4252 - DNA, 33 bp, homo sapiens
actgagagcattttcaktatcacagagactagc

SEQ ID NO: 4253 - DNA, 33 bp, homo sapiens
agttcaccatttatggkcagctaggttgatttc

SEQ ID NO: 4254 - DNA, 33 bp, homo sapiens
ctgtttcggagggccartatgtatttcttcact

SEQ ID NO: 4255 - DNA, 33 bp, homo sapiens
gctttattgtctatcayctgagaaacttcataa

SEQ ID NO: 4256 - DNA, 33 bp, homo sapiens
cagtttgtaaagccaawtgaacaaagatgagat

SEQ ID NO: 4257 - DNA, 33 bp, homo sapiens
atatggaagttagtaayggtgcactttgtggct

SEQ ID NO: 4258 - DNA, 33 bp, homo sapiens
agtagctccatgtttcyagttgttcaggataaa

SEQ ID NO: 4259 - DNA, 33 bp, homo sapiens
tcttcttagtacagcaytcaggaaaacagcatg

SEQ ID NO: 4260 - DNA, 33 bp, homo sapiens
gaattaacatacaaaargcataatgcaacaaaa

SEQ ID NO: 4261 - DNA, 33 bp, homo sapiens
gattctggaggaaacakactcatcatttataaa

SEQ ID NO: 4262 - DNA, 33 bp, homo sapiens
tagcagcggagtgaacrgcttttattaaataag

SEQ ID NO: 4263 - DNA, 33 bp, homo sapiens
ttaaaaaacaattaaakatgcggtatgaaggat

SEQ ID NO: 4264 - DNA, 33 bp, homo sapiens
attaactttgcactgawctcctctgaaggcaaa

SEQ ID NO: 4265 - DNA, 33 bp, homo sapiens
tcttaactgctgtaaaygggaggtcaccatatc

SEQ ID NO: 4266 - DNA, 33 bp, homo sapiens
tcctttatgggcttcargtgtcaccaaacagcc

SEQ ID NO: 4267 - DNA, 33 bp, homo sapiens
atttcaggctttagtgracagtatgtttgggtg

SEQ ID NO: 4268 - DNA, 33 bp, homo sapiens
taattttacagcacacraatgaagaattcctga

SEQ ID NO: 4269 - DNA, 33 bp, homo sapiens
actcatcaaagaactayggctgttaaagtcacc

SEQ ID NO: 4270 - DNA, 33 bp, homo sapiens
gaaattgaaaccttacragccagctcaagaaaa

SEQ ID NO: 4271 - DNA, 33 bp, homo sapiens
atgctgttgccaaatayagtacctctgtaggga

SEQ ID NO: 4272 - DNA, 33 bp, homo sapiens
ataaccaaactcttctyagaacaacgacacagt

SEQ ID NO: 4273 - DNA, 33 bp, homo sapiens
gagagtaatgaagtcayatcactgagaaggaat

SEQ ID NO: 4274 - DNA, 33 bp, homo sapiens
caggtaacagaagatcygacaaaggagagaaga

SEQ ID NO: 4275 - DNA, 33 bp, homo sapiens
ttagtctgcaagcatgkcatatgtctccattta

SEQ ID NO: 4276 - DNA, 33 bp, homo sapiens
tttgagagggtgatagrccaacaattcattgtc

SEQ ID NO: 4277 - DNA, 33 bp, homo sapiens
tctgtaaaattccaaaygacccacaatatggtt

SEQ ID NO: 4278 - DNA, 33 bp, homo sapiens
aaaaacactggaaacaragaaaagatcctaaag

SEQ ID NO: 4279 - DNA, 33 bp, homo sapiens
tattcaacacatataawgtaccacggttgttat

SEQ ID NO: 4280 - DNA, 33 bp, homo sapiens
tttagaaaacaggtcakaaatagctataggaga

SEQ ID NO: 4281 - DNA, 33 bp, homo sapiens
aaggttaaggttggagkagacgaaaatcaagag

SEQ ID NO: 4282 - DNA, 33 bp, homo sapiens
caaagacttttcctccmatctataagtacatat

SEQ ID NO: 4283 - DNA, 33 bp, homo sapiens
cagggaaggtgatagaracagagaaaatttaaa

SEQ ID NO: 4284 - DNA, 33 bp, homo sapiens
tgatgggcccattgagrattatgttgttgacta

SEQ ID NO: 4285 - DNA, 33 bp, homo sapiens
aaacaagccctgtggaraattccttccatcaag

SEQ ID NO: 4286 - DNA, 33 bp, homo sapiens
atagcagaagccttccwatagttaacaatacta

SEQ ID NO: 4287 - DNA, 33 bp, homo sapiens
atttctagtcttgttgwagatgatagaggatat

SEQ ID NO: 4288 - DNA, 33 bp, homo sapiens
gtaggatttaaaataawtgcagactctgacttt

SEQ ID NO: 4289 - DNA, 33 bp, homo sapiens
cgaaatgcaaaattggsaaatgagtagaatcct

SEQ ID NO: 4290 - DNA, 33 bp, homo sapiens
gacaggaccaaagggtraagccatgatttttct

SEQ ID NO: 4291 - DNA, 33 bp, homo sapiens
atgtgaaattttcagaygtgcctgcagacacta

SEQ ID NO: 4292 - DNA, 33 bp, homo sapiens
cactgggactaggtaakaatagagtcctggcaa

SEQ ID NO: 4293 - DNA, 33 bp, homo sapiens
attcgggtgattcttayggtgatacttggtaat

SEQ ID NO: 4294 - DNA, 33 bp, homo sapiens
ctgtaacaaaaattccycaatctgcttcatggg

SEQ ID NO: 4295 - DNA, 33 bp, homo sapiens
cgttctaggacaaaaamtcaatacttccgctgc

SEQ ID NO: 4296 - DNA, 33 bp, homo sapiens
caattaatcttgagctraatcagcaatccttga

SEQ ID NO: 4297 - DNA, 33 bp, homo sapiens
ctcttgagagtatatcyattcccacagctttgt

SEQ ID NO: 4298 - DNA, 33 bp, homo sapiens
gtgaaataatacacaaygcctcccagctttgcg

SEQ ID NO: 4299 - DNA, 33 bp, homo sapiens
ttctgtcagcttattayccaaaaagacaggtag

SEQ ID NO: 4300 - DNA, 33 bp, homo sapiens
accatatcttgagccayaaaacaagcctgtgca

SEQ ID NO: 4301 - DNA, 33 bp, homo sapiens
taccatcatactttctsactcaacaattgagca

SEQ ID NO: 4302 - DNA, 33 bp, homo sapiens
cagttacatctctggakaggcatctagattagc

SEQ ID NO: 4303 - DNA, 33 bp, homo sapiens
tcatcaatccctcaaasagaatctccctcaagt

SEQ ID NO: 4304 - DNA, 33 bp, homo sapiens
tttttaatttgtggctmaaatctgaaaccactc

SEQ ID NO: 4305 - DNA, 33 bp, homo sapiens
gacctcttatcgaaccygctttatgttgctctg

SEQ ID NO: 4306 - DNA, 33 bp, homo sapiens
tttctagttaactcgakgattttctattctctt

SEQ ID NO: 4307 - DNA, 33 bp, homo sapiens
tgcaatcaactacgtcyactggcttcggaattg

SEQ ID NO: 4308 - DNA, 33 bp, homo sapiens
taacgttataactgtayctcattttagtccagt

SEQ ID NO: 4309 - DNA, 33 bp, homo sapiens
ctttttagttagcaagycagtggcctgtcattt

SEQ ID NO: 4310 - DNA, 33 bp, homo sapiens
ttcctatacatcaatarggtctactttagaaaa

SEQ ID NO: 4311 - DNA, 33 bp, homo sapiens
cttttagaacaaaacakagggaaaccttcttga

SEQ ID NO: 4312 - DNA, 33 bp, homo sapiens
aactgatcttctggctraataggaagcatggtg

SEQ ID NO: 4313 - DNA, 33 bp, homo sapiens
aaaatgaaagtagaacyggatgtggaagaggca

SEQ ID NO: 4314 - DNA, 33 bp, homo sapiens
atgtgcctcatatctgraactcttcattatatc

SEQ ID NO: 4315 - DNA, 33 bp, homo sapiens
tgcaaatgcttacacawcctatgccccgataaa

SEQ ID NO: 4316 - DNA, 33 bp, homo sapiens
tacaggtgtcattagasgaggaggaaagtttct

SEQ ID NO: 4317 - DNA, 33 bp, homo sapiens
ccaatgaacttaaagcrgagttcctcatccttt

SEQ ID NO: 4318 - DNA, 33 bp, homo sapiens
ttatagctatttaatcrccgatgtatttggatt

SEQ ID NO: 4319 - DNA, 33 bp, homo sapiens
atacacctatagcactkaataaaaatactgctg

SEQ ID NO: 4320 - DNA, 33 bp, homo sapiens
ctacttcatggtgacartagtgaatacagatga

SEQ ID NO: 4321 - DNA, 33 bp, homo sapiens
tccaggaaaatatggtwaaactaggacagctct

SEQ ID NO: 4322 - DNA, 33 bp, homo sapiens
tgtgagtattcttcccyggactaaggttgtagt

SEQ ID NO: 4323 - DNA, 33 bp, homo sapiens
cttcttataaccataamaagactcaggcttaaa

SEQ ID NO: 4324 - DNA, 33 bp, homo sapiens
tcaaatgattactcccraatttttccacctccc

SEQ ID NO: 4325 - DNA, 33 bp, homo sapiens
ccatctcccacaccacyggcaggattgatcatt

SEQ ID NO: 4326 - DNA, 33 bp, homo sapiens
gttacggatttcttcamaaggaacagggagttg

SEQ ID NO: 4327 - DNA, 33 bp, homo sapiens
tttgctttggtttaaaygctctgattataatta

SEQ ID NO: 4328 - DNA, 33 bp, homo sapiens
aggtctttacccacaastcatttttctcagttg

SEQ ID NO: 4329 - DNA, 33 bp, homo sapiens
ccggagtacataaggcrcaggaaaaataaaatg

SEQ ID NO: 4330 - DNA, 33 bp, homo sapiens
tgttaaccaaacctacmatatcatcactctaat

SEQ ID NO: 4331 - DNA, 33 bp, homo sapiens
cagagttgtgactggaygaccattaagccccaa

SEQ ID NO: 4332 - DNA, 33 bp, homo sapiens
ttattccttagctgcasatattttgctattagc

SEQ ID NO: 4333 - DNA, 33 bp, homo sapiens
tctcttgtgtgccaggracagatataagcacta

SEQ ID NO: 4334 - DNA, 33 bp, homo sapiens
agtgactctatgaccaygtactgtattatacgg

SEQ ID NO: 4335 - DNA, 33 bp, homo sapiens
tcaaccacataagccastataccacgtaagtga

SEQ ID NO: 4336 - DNA, 33 bp, homo sapiens
aactaagtgaattgatraggttacagagtgagt

SEQ ID NO: 4337 - DNA, 33 bp, homo sapiens
caaatagcacaagggasaatttgagggcattgt

SEQ ID NO: 4338 - DNA, 33 bp, homo sapiens
atgaaggctcaacaaartaatcttgaaatttac

SEQ ID NO: 4339 - DNA, 33 bp, homo sapiens
tggcaagtcaatgctcrgagaaaccagcagtgg

SEQ ID NO: 4340 - DNA, 33 bp, homo sapiens
tcctagagaaaacaackaagtggaattatggct

SEQ ID NO: 4341 - DNA, 33 bp, homo sapiens
cagctccaaatttccaygattattaagaaaaac

SEQ ID NO: 4342 - DNA, 33 bp, homo sapiens
ttgccagtgaccaaacsagcagtgtgaacgcat

SEQ ID NO: 4343 - DNA, 33 bp, homo sapiens
gtttctcacattttgarcatttccgatgagcat

SEQ ID NO: 4344 - DNA, 33 bp, homo sapiens
gaatccaggatcaatayaacaccatatacttct

SEQ ID NO: 4345 - DNA, 33 bp, homo sapiens
gcttagtgttgtctaaytggatatcgtgagtgg

SEQ ID NO: 4346 - DNA, 33 bp, homo sapiens
gctgaaatgtggtaaawgtgtgtcgtatacaaa

SEQ ID NO: 4347 - DNA, 33 bp, homo sapiens
ttgacaatgttctttgyatagtcattttcaaag

SEQ ID NO: 4348 - DNA, 33 bp, homo sapiens
gttctcatcttgctggmattggatttaattttg

SEQ ID NO: 4349 - DNA, 33 bp, homo sapiens
gaacgaaaggcaataaygaactaatcttctcaa

SEQ ID NO: 4350 - DNA, 33 bp, homo sapiens
agcacactacatcaatkaacacaaaagcaactt

SEQ ID NO: 4351 - DNA, 33 bp, homo sapiens
tgagaaaaagacatgarcaagcctagattagat

SEQ ID NO: 4352 - DNA, 33 bp, homo sapiens
tgagctattgagtatcraaaattcagaggaaaa

SEQ ID NO: 4353 - DNA, 33 bp, homo sapiens
ctgcacatctcttgacrctgagttactctccat

SEQ ID NO: 4354 - DNA, 33 bp, homo sapiens
ctgacctaagcctcacyatgatgtttctgaaac

SEQ ID NO: 4355 - DNA, 33 bp, homo sapiens
tttgtcagtccttccarcattcctcacctatta

SEQ ID NO: 4356 - DNA, 33 bp, homo sapiens
ctaccatttctctccaygtctgcacgggaccct

SEQ ID NO: 4357 - DNA, 33 bp, homo sapiens
gaattgagctcttcctragaatgtactctttca

SEQ ID NO: 4358 - DNA, 33 bp, homo sapiens
agtccttcagaactggractttcagactcaatc

SEQ ID NO: 4359 - DNA, 33 bp, homo sapiens
agccgttgagacctccmataagttcttgccatg

SEQ ID NO: 4360 - DNA, 33 bp, homo sapiens
gatacagggcaaaagcmacaggaaaagatgtat

SEQ ID NO: 4361 - DNA, 33 bp, homo sapiens
agctatcaatgactaargcatttttaaagcatg

SEQ ID NO: 4362 - DNA, 33 bp, homo sapiens
gtgggacagatgggacracatggggtttgagct

SEQ ID NO: 4363 - DNA, 33 bp, homo sapiens
ctaagttagccatatgracctgaaagtcacctg

SEQ ID NO: 4364 - DNA, 33 bp, homo sapiens
cttgaaaatcactgacygcactgtggtataaag

SEQ ID NO: 4365 - DNA, 33 bp, homo sapiens
catcaaatctcactgawctcattatagccaaag

SEQ ID NO: 4366 - DNA, 33 bp, homo sapiens
tattcctgtgtactcartaattagtaactgctg

SEQ ID NO: 4367 - DNA, 33 bp, homo sapiens
agatattaactcaggcraaattagatgcacccc

SEQ ID NO: 4368 - DNA, 33 bp, homo sapiens
ggacaaggacacattcyctgccaaatctccttc

SEQ ID NO: 4369 - DNA, 33 bp, homo sapiens
tacagcatcctacacaygacaatataagtaaca

SEQ ID NO: 4370 - DNA, 33 bp, homo sapiens
agacactgaggccaccrgaaagggcagagcatg

SEQ ID NO: 4371 - DNA, 33 bp, homo sapiens
ttcacagggcatcggayggagtacctagacagg

SEQ ID NO: 4372 - DNA, 33 bp, homo sapiens
tgcataatgtatacacrcacttggtacagcgta

SEQ ID NO: 4373 - DNA, 33 bp, homo sapiens
tctaacaagatcctaartgatgacgttaatgtt

SEQ ID NO: 4374 - DNA, 33 bp, homo sapiens
accctaattggaaatamagaacagagcactcag

SEQ ID NO: 4375 - DNA, 33 bp, homo sapiens
taactgacacgtgttcmctgaattttaatttga

SEQ ID NO: 4376 - DNA, 33 bp, homo sapiens
gaagacagagatgtaartagtggttcacttatc

SEQ ID NO: 4377 - DNA, 33 bp, homo sapiens
acatccacgcttgtaartatcacgctgatgctg

SEQ ID NO: 4378 - DNA, 33 bp, homo sapiens
gttgcttagaactaaakctaactcaggttctct

SEQ ID NO: 4379 - DNA, 33 bp, homo sapiens
cttgtgccttgtaggakatttagctgcatggct

SEQ ID NO: 4380 - DNA, 33 bp, homo sapiens
cagttatagaatgggaratcactacatatatta

SEQ ID NO: 4381 - DNA, 33 bp, homo sapiens
tgtttattgttgttgamactgaaataaaacatg

SEQ ID NO: 4382 - DNA, 33 bp, homo sapiens
cctagcttctgtgttaycatttgtgacttttcc

SEQ ID NO: 4383 - DNA, 33 bp, homo sapiens
cacttcaaaatggagaygtgatttatgggcatg

SEQ ID NO: 4384 - DNA, 33 bp, homo sapiens
atcttgcttcaccttcygagaaatgctcgccct

SEQ ID NO: 4385 - DNA, 33 bp, homo sapiens
agaaatgtgtactcctmaactgcagataaaaag

SEQ ID NO: 4386 - DNA, 33 bp, homo sapiens
atgcagatattgatttyaaagtgaggttggtgc

SEQ ID NO: 4387 - DNA, 33 bp, homo sapiens
aggtaggctgctaggcratgtttcccttgaaat

SEQ ID NO: 4388 - DNA, 33 bp, homo sapiens
ctcctaccttgaagcawtcttatttcagctcag

SEQ ID NO: 4389 - DNA, 33 bp, homo sapiens
tctatccatttcagcaycaattggttcctagat

SEQ ID NO: 4390 - DNA, 33 bp, homo sapiens
tgctgaaatggatagargtagcacgagtgaaaa

SEQ ID NO: 4391 - DNA, 33 bp, homo sapiens
accagccaaataatcaragaacacatgaagtgt

SEQ ID NO: 4392 - DNA, 33 bp, homo sapiens
gccggtctcttatagcycgctcctcagtgcccg

SEQ ID NO: 4393 - DNA, 33 bp, homo sapiens
cttgaagggtcaccgcrctctcatggatcatgt

SEQ ID NO: 4394 - DNA, 33 bp, homo sapiens
agacacagagaagtgcwaggaaaaattacacag

SEQ ID NO: 4395 - DNA, 33 bp, homo sapiens
ccttggtggttcctgcrgcaaaagtccacagta

SEQ ID NO: 4396 - DNA, 33 bp, homo sapiens
atccaggcaaccttgawgtaccattactcagaa

SEQ ID NO: 4397 - DNA, 33 bp, homo sapiens
tgcaagccacgtgaacsacaacctcccaacaca

SEQ ID NO: 4398 - DNA, 33 bp, homo sapiens
accttaatgaaagaaarccttgatgattcagag

SEQ ID NO: 4399 - DNA, 33 bp, homo sapiens
tctctcaacagaacccratgtgtatcacacaca

SEQ ID NO: 4400 - DNA, 33 bp, homo sapiens
gaacacactcagctccrcctctcctcagaaggc

SEQ ID NO: 4401 - DNA, 33 bp, homo sapiens
cttagcattaaatctcmactagaagaacaaggt

SEQ ID NO: 4402 - DNA, 33 bp, homo sapiens
ccactgagtttcctaaraaaaaactgctgaaag

SEQ ID NO: 4403 - DNA, 33 bp, homo sapiens
gaactgtgctaagtgcrcactatgcttttgatc

SEQ ID NO: 4404 - DNA, 33 bp, homo sapiens
tcatactttgctggacwcctggattcttctacc

SEQ ID NO: 4405 - DNA, 33 bp, homo sapiens
tctcggcagtaccagcygctgactctctgtccc

SEQ ID NO: 4406 - DNA, 33 bp, homo sapiens
aggcctgtgaccgggarggggctgagtccaagc

SEQ ID NO: 4407 - DNA, 33 bp, homo sapiens
attagttgaatgcttargaagaatagtaataaa

SEQ ID NO: 4408 - DNA, 33 bp, homo sapiens
caatttagcatcacaawaagtgaacactgaagg

SEQ ID NO: 4409 - DNA, 33 bp, homo sapiens
cgttttctaaaagtgaygattgtctgagaaaac

SEQ ID NO: 4410 - DNA, 33 bp, homo sapiens
acagctttcaggatccycatttcccaggaatca

SEQ ID NO: 4411 - DNA, 33 bp, homo sapiens
ctgatgaggctgcttawaagtgatcattcagat

SEQ ID NO: 4412 - DNA, 33 bp, homo sapiens
ctcagcagatgctgggwagtgcgtgaattcatg

SEQ ID NO: 4413 - DNA, 33 bp, homo sapiens
ggactgtcccaagcacsaaggctatctgcagtt

SEQ ID NO: 4414 - DNA, 33 bp, homo sapiens
gtctgctaaaagctcakagaattgacttgccta

SEQ ID NO: 4415 - DNA, 33 bp, homo sapiens
ggaggatatgtgccaayggcaaagaaacttgga

SEQ ID NO: 4416 - DNA, 33 bp, homo sapiens
ctctcatttggtgaacraggctgcggacccttg

SEQ ID NO: 4417 - DNA, 33 bp, homo sapiens
acttacgatgcagaaaygggtcctttcctctcc

SEQ ID NO: 4418 - DNA, 33 bp, homo sapiens
tgcacaggaaggctagrcacatcagattgaagt

SEQ ID NO: 4419 - DNA, 33 bp, homo sapiens
atagatgccgggaatakagatgggattatccca

SEQ ID NO: 4420 - DNA, 33 bp, homo sapiens
attttctgggtccaagrcaaaatcttaaaggtg

SEQ ID NO: 4421 - DNA, 33 bp, homo sapiens
gaagaggcactgtgacraagagacttcacccat

SEQ ID NO: 4422 - DNA, 33 bp, homo sapiens
cagttttgaaggtgcayagcaacaattttgtgt

SEQ ID NO: 4423 - DNA, 33 bp, homo sapiens
aaacataggatggcaarcactcaacatcctcac

SEQ ID NO: 4424 - DNA, 33 bp, homo sapiens
actgcaagggagaaaaygtggctagaatcttgt

SEQ ID NO: 4425 - DNA, 33 bp, homo sapiens
tgaaggcaccgaaagcyaagcacagttggctcc

SEQ ID NO: 4426 - DNA, 33 bp, homo sapiens
atgatgttaaaacgatmaaatatgcgatttcag

SEQ ID NO: 4427 - DNA, 33 bp, homo sapiens
actcttttagtttccaygtatgagtaagaacat

SEQ ID NO: 4428 - DNA, 33 bp, homo sapiens
aataccaaacacacaaktgaaaagggaacgctg

SEQ ID NO: 4429 - DNA, 33 bp, homo sapiens
tgctgatagttacagaraagaaaaatggcatca

SEQ ID NO: 4430 - DNA, 33 bp, homo sapiens
aaaggatatgcttacamtattacaaatgacagt

SEQ ID NO: 4431 - DNA, 33 bp, homo sapiens
gcatctgaaagcatcayagtatggaggagggag

SEQ ID NO: 4432 - DNA, 33 bp, homo sapiens
ctggccattaacacaayacacttatcacaatgg

SEQ ID NO: 4433 - DNA, 33 bp, homo sapiens
tgagtgtcaagtaggaygtccctttgggcagta

SEQ ID NO: 4434 - DNA, 33 bp, homo sapiens
tttccttacaacaccaygtgaaggcagaattct

SEQ ID NO: 4435 - DNA, 33 bp, homo sapiens
tagtgaggctcacagcragttaggtagatggga

SEQ ID NO: 4436 - DNA, 33 bp, homo sapiens
gaggggcacaaatgackcagcaggagtgggagt

SEQ ID NO: 4437 - DNA, 33 bp, homo sapiens
gtaggttggttgctcargtttaggtttctctgg

SEQ ID NO: 4438 - DNA, 33 bp, homo sapiens
ttccaatgcagttaaayggctcatactttcaga

SEQ ID NO: 4439 - DNA, 33 bp, homo sapiens
gatgagagttaggtccygcatgtgaggattcag

SEQ ID NO: 4440 - DNA, 33 bp, homo sapiens
cacaagaataaataaarcagtgtgtctgcaagg

SEQ ID NO: 4441 - DNA, 33 bp, homo sapiens
acatggaacacaaacawtgcaagttggagaagc

SEQ ID NO: 4442 - DNA, 33 bp, homo sapiens
gaactaccgaatgatgraaaatgcctccatagt

SEQ ID NO: 4443 - DNA, 33 bp, homo sapiens
ctcctacttaaaaacayattcaaggctggattc

SEQ ID NO: 4444 - DNA, 33 bp, homo sapiens
gagtgctctgacttcaytagttccccaaaggca

SEQ ID NO: 4445 - DNA, 33 bp, homo sapiens
tttattttcaacaagaygccaaggtaattccat

SEQ ID NO: 4446 - DNA, 33 bp, homo sapiens
catcgctgatgttccaygacagtttccagtacc

SEQ ID NO: 4447 - DNA, 33 bp, homo sapiens
gcactttaaagtgtacrgcctaagaaattattt

SEQ ID NO: 4448 - DNA, 33 bp, homo sapiens
aagcggtggatttggcyatttgatgtaccctac

SEQ ID NO: 4449 - DNA, 33 bp, homo sapiens
ctgttgaactaagtgartaagaaactgacatag

SEQ ID NO: 4450 - DNA, 33 bp, homo sapiens
ctttatgaaaaaaaatracttcacaatccaggt

SEQ ID NO: 4451 - DNA, 33 bp, homo sapiens
tgctcccatctctagtmaagccagtgacaaatc

SEQ ID NO: 4452 - DNA, 33 bp, homo sapiens
actcctgagatctccargtagaaatattaggga

SEQ ID NO: 4453 - DNA, 33 bp, homo sapiens
acttactttgtaaaaaytggaggtatattcaga

SEQ ID NO: 4454 - DNA, 33 bp, homo sapiens
ttttaagaaaactcagraatctaacattaattt

SEQ ID NO: 4455 - DNA, 33 bp, homo sapiens
aaccccaaacacctaasaagttcaataacccag

SEQ ID NO: 4456 - DNA, 33 bp, homo sapiens
atttaaaaaacttgcaragaacagtatgaaata

SEQ ID NO: 4457 - DNA, 33 bp, homo sapiens
acaaacaatgagagaaytcacaagtggctagag

SEQ ID NO: 4458 - DNA, 33 bp, homo sapiens
gggaatgtcagaggtaragggtgtctgtctttg

SEQ ID NO: 4459 - DNA, 33 bp, homo sapiens
tactgtcctcactcaawgagccgtctagtaagg

SEQ ID NO: 4460 - DNA, 33 bp, homo sapiens
gttataatactagtaawaagaaggcagccattt

SEQ ID NO: 4461 - DNA, 33 bp, homo sapiens
gacatgccgtgttagaytccaaactggttccat

SEQ ID NO: 4462 - DNA, 33 bp, homo sapiens
cctggaatgtgcgggaragctggggtagcagag

SEQ ID NO: 4463 - DNA, 33 bp, homo sapiens
ggccaacctctcaacaytaccacattggggatc

SEQ ID NO: 4464 - DNA, 33 bp, homo sapiens
ttcttgccttttcacgyagttgtgctgtagtta

SEQ ID NO: 4465 - DNA, 33 bp, homo sapiens
aaagttaggtgaccaamatgtcctctagtcatc

SEQ ID NO: 4466 - DNA, 33 bp, homo sapiens
ttcattgagaacttgcygagtactaggtaccat

SEQ ID NO: 4467 - DNA, 33 bp, homo sapiens
gatagattagttacacygggctttggactctag

SEQ ID NO: 4468 - DNA, 33 bp, homo sapiens
ttgaaactccagctaaytactatacttccattt

SEQ ID NO: 4469 - DNA, 33 bp, homo sapiens
tgtagaatttcagagcratggctatgacgattt

SEQ ID NO: 4470 - DNA, 33 bp, homo sapiens
ccagctcctcggaacamgtatgagcatcaattt

SEQ ID NO: 4471 - DNA, 33 bp, homo sapiens
aatatatcttggcacaygataagtctttaaaat

SEQ ID NO: 4472 - DNA, 33 bp, homo sapiens
tggaaagtaaatagaaytgcatgttgcaaacat

SEQ ID NO: 4473 - DNA, 33 bp, homo sapiens
agcccatgtgagaatamcaggatttggtagaat

SEQ ID NO: 4474 - DNA, 33 bp, homo sapiens
gaatacaaattgtttgwacagaaagatggaagc

SEQ ID NO: 4475 - DNA, 33 bp, homo sapiens
actctgttgctaaggcygaagtgcaacagctat

SEQ ID NO: 4476 - DNA, 33 bp, homo sapiens
cacagagaaacaaaaaygtaattgcatccccca

SEQ ID NO: 4477 - DNA, 33 bp, homo sapiens
gtgtttccaagcatccrccaagcagatctgatg

SEQ ID NO: 4478 - DNA, 33 bp, homo sapiens
gagagtaagtaacgaasccaaagtcaactgtcc

SEQ ID NO: 4479 - DNA, 33 bp, homo sapiens
ggtacaagctgggagasaggttataagctcttg

SEQ ID NO: 4480 - DNA, 33 bp, homo sapiens
tacaactccctttgccsaagatgtctgtcacac

SEQ ID NO: 4481 - DNA, 33 bp, homo sapiens
ggccactgagcaaccaraacctttccagctggt

SEQ ID NO: 4482 - DNA, 33 bp, homo sapiens
gatgatggaatctaccraacgaataataacata

SEQ ID NO: 4483 - DNA, 33 bp, homo sapiens
tattcctataggaaacrgagtcccatgtttaca

SEQ ID NO: 4484 - DNA, 33 bp, homo sapiens
atctcatcctgacctamatagagacatttctta

SEQ ID NO: 4485 - DNA, 33 bp, homo sapiens
gccaagaaggacatgaygatccgctgttgctca

SEQ ID NO: 4486 - DNA, 33 bp, homo sapiens
ggaaaaatcttaaaacyggatctagtctcttta

SEQ ID NO: 4487 - DNA, 33 bp, homo sapiens
tccaatataatgctcawtagcccctccttcatc

SEQ ID NO: 4488 - DNA, 33 bp, homo sapiens
gctaaaacctaggaaarttggaataaagtgtgg

SEQ ID NO: 4489 - DNA, 33 bp, homo sapiens
acattaaagtagagaartagcaaaatgggatct

SEQ ID NO: 4490 - DNA, 33 bp, homo sapiens
tcaccagtcagtcataygcttactatctcgtct

SEQ ID NO: 4491 - DNA, 33 bp, homo sapiens
gtacataccttctataktacactgatgatacaa

SEQ ID NO: 4492 - DNA, 33 bp, homo sapiens
gaatttctgtcttcaarcctctttcagacagaa

SEQ ID NO: 4493 - DNA, 33 bp, homo sapiens
caaagagaaagcgttaygggagaggaactttgg

SEQ ID NO: 4494 - DNA, 33 bp, homo sapiens
aagtctcaaaggtgcaragataaagtttttata

SEQ ID NO: 4495 - DNA, 33 bp, homo sapiens
tcaataattttgaagcrcaatcttttatctctt

SEQ ID NO: 4496 - DNA, 33 bp, homo sapiens
tggaggcatgaccaaaytctggatgacatcatt

SEQ ID NO: 4497 - DNA, 33 bp, homo sapiens
gacgctgtcacataacyctctgccactgcccaa

SEQ ID NO: 4498 - DNA, 33 bp, homo sapiens
tgtggccacttctttcmatttggactactctga

SEQ ID NO: 4499 - DNA, 33 bp, homo sapiens
aagttgcaaggtaatayagtcccatttttgtaa

SEQ ID NO: 4500 - DNA, 33 bp, homo sapiens
tctgtacttaggtaaayatgatggatttttttt

SEQ ID NO: 4501 - DNA, 33 bp, homo sapiens
tgattgaactggaaaamaatgtgatgaatttat

SEQ ID NO: 4502 - DNA, 33 bp, homo sapiens
tttcctactgtgaataktatgtagaggaataag

SEQ ID NO: 4503 - DNA, 33 bp, homo sapiens
cggctctccaagtacarcacggaagaattcatc

SEQ ID NO: 4504 - DNA, 33 bp, homo sapiens
aacattttatggtttgyaacagctcctggatga

SEQ ID NO: 4505 - DNA, 33 bp, homo sapiens
atataaacttagaagamaattgcattttgtggg

SEQ ID NO: 4506 - DNA, 33 bp, homo sapiens
catcagacaaaagcaaygaaaatccttcacaag

SEQ ID NO: 4507 - DNA, 33 bp, homo sapiens
ctgtcctttccatacamagtcagatgctgggaa

SEQ ID NO: 4508 - DNA, 33 bp, homo sapiens
tgaaactttacacccaytgaagaccttcacatt

SEQ ID NO: 4509 - DNA, 33 bp, homo sapiens
aaacctccaatggctaygaaaaaaaaaagttgt

SEQ ID NO: 4510 - DNA, 33 bp, homo sapiens
aaggaatccaaaataawacgtttgctgggaatt

SEQ ID NO: 4511 - DNA, 33 bp, homo sapiens
gttatgttattcatcawcagcaaaaatacagta

SEQ ID NO: 4512 - DNA, 33 bp, homo sapiens
gggtgaatgggaatcaycttccccggctgtcag

SEQ ID NO: 4513 - DNA, 33 bp, homo sapiens
tgttttaaggacaatargtactgtggcaggacg

SEQ ID NO: 4514 - DNA, 33 bp, homo sapiens
gctgaaactgtggaacrgcaaagtcaggtgact

SEQ ID NO: 4515 - DNA, 33 bp, homo sapiens
agagagcacaccgctargggcatctggattcct

SEQ ID NO: 4516 - DNA, 33 bp, homo sapiens
ggggctcagttacttakgagttgcatagatcca

SEQ ID NO: 4517 - DNA, 33 bp, homo sapiens
gccaaataccacagacyggtggattgaacagtg

SEQ ID NO: 4518 - DNA, 33 bp, homo sapiens
tcctaatgcttggcgaygattcctgcatgttcc

SEQ ID NO: 4519 - DNA, 33 bp, homo sapiens
tatctgatactgataaygcatgttaggttctta

SEQ ID NO: 4520 - DNA, 33 bp, homo sapiens
gtatatagcatgattgratcgcatttcctagat

SEQ ID NO: 4521 - DNA, 33 bp, homo sapiens
aatacataataatgatsaagagcaggaattcaa

SEQ ID NO: 4522 - DNA, 33 bp, homo sapiens
gtaggtggttgctgctsaagttttcagaggtga

SEQ ID NO: 4523 - DNA, 33 bp, homo sapiens
ctagctccactattccyaagcacatattatcta

SEQ ID NO: 4524 - DNA, 33 bp, homo sapiens
gaaatgctggcaagccraaaagtgtcagctgaa

SEQ ID NO: 4525 - DNA, 33 bp, homo sapiens
aaaggacaccaggtatsagccccaagaatgtgt

SEQ ID NO: 4526 - DNA, 33 bp, homo sapiens
tgtttttatgcttttgrtccttcccatataaaa

SEQ ID NO: 4527 - DNA, 33 bp, homo sapiens
ttaggctgcattgggaygagtggtttcggtcct

SEQ ID NO: 4528 - DNA, 33 bp, homo sapiens
tgattacatctcaaaaktcagttaatatcttcc

SEQ ID NO: 4529 - DNA, 33 bp, homo sapiens
gaaagtggctgaatacyatgcagtcattacgag

SEQ ID NO: 4530 - DNA, 33 bp, homo sapiens
agatgccttgatataaragtaatctgaggctga

SEQ ID NO: 4531 - DNA, 33 bp, homo sapiens
actattttttaaggtcycaaagtcttctaaaca

SEQ ID NO: 4532 - DNA, 33 bp, homo sapiens
gaggagctcttcaacaractgtcaaataaatct

SEQ ID NO: 4533 - DNA, 33 bp, homo sapiens
gctcatgagaaatctcrcacaagattgccgttg

SEQ ID NO: 4534 - DNA, 33 bp, homo sapiens
atgataatagttcccawatagaaagaggaagag

SEQ ID NO: 4535 - DNA, 33 bp, homo sapiens
ttttccatttttttcaragaacacatcaatttc

SEQ ID NO: 4536 - DNA, 33 bp, homo sapiens
ggacaatagggctgaayccagacttgaggagac

SEQ ID NO: 4537 - DNA, 33 bp, homo sapiens
ttacagtaattctgcaytgagaagctttctctg

SEQ ID NO: 4538 - DNA, 33 bp, homo sapiens
atttaatgtgttagggkacaatcataatgagtc

SEQ ID NO: 4539 - DNA, 33 bp, homo sapiens
catagagtaagcaaacraggaaagctgaactat

SEQ ID NO: 4540 - DNA, 33 bp, homo sapiens
tgttggttagtgtaaaygggtgaatttgttctt

SEQ ID NO: 4541 - DNA, 33 bp, homo sapiens
catttcattttctagamgtctgcactacattaa

SEQ ID NO: 4542 - DNA, 33 bp, homo sapiens
gttctctactgctctcyataaggttggatgccg

SEQ ID NO: 4543 - DNA, 33 bp, homo sapiens
ttgataaacagtaagcygcaggaaaaagcattt

SEQ ID NO: 4544 - DNA, 33 bp, homo sapiens
cattaagtaatactcaraaagtcaactgcatta

SEQ ID NO: 4545 - DNA, 33 bp, homo sapiens
tttctttactgtttgcsaatgactttgtgaaac

SEQ ID NO: 4546 - DNA, 33 bp, homo sapiens
aagcttcttcctatcawgtgcatttttcttgaa

SEQ ID NO: 4547 - DNA, 33 bp, homo sapiens
tacgatcatcaactcasctttgggcatttaagt

SEQ ID NO: 4548 - DNA, 33 bp, homo sapiens
tagcccttatgtcatcrcttttgtgttaaagac

SEQ ID NO: 4549 - DNA, 33 bp, homo sapiens
cataattttttgatcargcatctgaaaccaaag

SEQ ID NO: 4550 - DNA, 33 bp, homo sapiens
tagatacatcttcaagrcaaagtcctctgctat

SEQ ID NO: 4551 - DNA, 33 bp, homo sapiens
agatacttcagcaaaartggtagatggatgaca

SEQ ID NO: 4552 - DNA, 33 bp, homo sapiens
tttgatgacctttaaayctggttcctccactct

SEQ ID NO: 4553 - DNA, 33 bp, homo sapiens
ccactccatagcctcaytctctttcttctgtcg

SEQ ID NO: 4554 - DNA, 33 bp, homo sapiens
ttgacgaatttgagtcyaagtaatgggcaccca

SEQ ID NO: 4555 - DNA, 33 bp, homo sapiens
tatgcaagaaatgatasgaagtcctcacaaact

SEQ ID NO: 4556 - DNA, 33 bp, homo sapiens
agttgtggtgaatatamatctgtgcagggtgat

SEQ ID NO: 4557 - DNA, 33 bp, homo sapiens
aatgaaaattggaacasataggtttgaggtagg

SEQ ID NO: 4558 - DNA, 33 bp, homo sapiens
ttctgggcataggcaaycttttctgttttttca

SEQ ID NO: 4559 - DNA, 33 bp, homo sapiens
gacatgattgtgtttcraaatgtaagaacttga

SEQ ID NO: 4560 - DNA, 33 bp, homo sapiens
gtgagacaggtagtaargtgcctaggaaacatt

SEQ ID NO: 4561 - DNA, 33 bp, homo sapiens
tataatctacacgaatwagctgccagtaaaatg

SEQ ID NO: 4562 - DNA, 33 bp, homo sapiens
aatccaggcaatgaaargttatggaaactgcta

SEQ ID NO: 4563 - DNA, 33 bp, homo sapiens
tgagctccaacaaaaaygattctagtgaattcc

SEQ ID NO: 4564 - DNA, 33 bp, homo sapiens
ttagtttgatttcttcrcttcagtttgtatatt

SEQ ID NO: 4565 - DNA, 33 bp, homo sapiens
acatgggtgcaccttaycatattcatcacagaa

SEQ ID NO: 4566 - DNA, 33 bp, homo sapiens
taaaaattgaagtgtamataattggtaatagat

SEQ ID NO: 4567 - DNA, 33 bp, homo sapiens
ttagtgatgatactacracctggttaaataaca

SEQ ID NO: 4568 - DNA, 33 bp, homo sapiens
ttttttcccaccatacyatgctttttccttctt

SEQ ID NO: 4569 - DNA, 33 bp, homo sapiens
tgcttataatgcttgaycatcttctctgcattt

SEQ ID NO: 4570 - DNA, 33 bp, homo sapiens
attttatcaatactagmcaaacaaacctactga

SEQ ID NO: 4571 - DNA, 33 bp, homo sapiens
gatagcccttacaagcwgatactggagaatgaa

SEQ ID NO: 4572 - DNA, 33 bp, homo sapiens
atttaacatttatgtcrcactttacattttcaa

SEQ ID NO: 4573 - DNA, 33 bp, homo sapiens
ggattgtagttttaaakaattatcctgcaaaca

SEQ ID NO: 4574 - DNA, 33 bp, homo sapiens
gtgaggattgacaaatragtgtatcaagtacac

SEQ ID NO: 4575 - DNA, 33 bp, homo sapiens
tggacctactacagaaragattgctgagtaagg

SEQ ID NO: 4576 - DNA, 33 bp, homo sapiens
gcatgggactacctcasagttttacatgaggtc

SEQ ID NO: 4577 - DNA, 33 bp, homo sapiens
ccacattcggttcacayataattacaagttata

SEQ ID NO: 4578 - DNA, 33 bp, homo sapiens
aagaacactgctctaaycatcctgggagtaacc

SEQ ID NO: 4579 - DNA, 33 bp, homo sapiens
tacggccttgcccctcrgacaattgctgactgt

SEQ ID NO: 4580 - DNA, 33 bp, homo sapiens
ggtttgcaggggagacratgctcaggacgctgg

SEQ ID NO: 4581 - DNA, 33 bp, homo sapiens
gacttgggtcatgtggyattagtttgacctctg

SEQ ID NO: 4582 - DNA, 33 bp, homo sapiens
aagaaaactcacatcaygttaatacacaaataa

SEQ ID NO: 4583 - DNA, 33 bp, homo sapiens
tgccattgcaggaagcrctgtgaagaggggcag

SEQ ID NO: 4584 - DNA, 33 bp, homo sapiens
agaatgtgtccaaaaamtgaatgctaagcattc

SEQ ID NO: 4585 - DNA, 33 bp, homo sapiens
gtgatcattttcttcaratcatcctcaaacaat

SEQ ID NO: 4586 - DNA, 33 bp, homo sapiens
ttgaaacgattgtcagratgtttcaaaatgata

SEQ ID NO: 4587 - DNA, 33 bp, homo sapiens
agcccaagcccataaaygatgaacaataactga

SEQ ID NO: 4588 - DNA, 33 bp, homo sapiens
gtcacttttcaaaccakgaaataatgtatgtcc

SEQ ID NO: 4589 - DNA, 33 bp, homo sapiens
gcagatgacctgcagargaagctgatacctttt

SEQ ID NO: 4590 - DNA, 33 bp, homo sapiens
gacactcaccccgtcamaatctggaccctctct

SEQ ID NO: 4591 - DNA, 33 bp, homo sapiens
cctgaggctcagaaaarctgcctgggttagacg

SEQ ID NO: 4592 - DNA, 33 bp, homo sapiens
cttctcacagggcccartgactttcttcatgcc

SEQ ID NO: 4593 - DNA, 33 bp, homo sapiens
aacccaagcacagaagmaaacagagcctgcaag

SEQ ID NO: 4594 - DNA, 33 bp, homo sapiens
aacttgaactgaagagsaaggcatttgagaggg

SEQ ID NO: 4595 - DNA, 33 bp, homo sapiens
cagagataagctggtcyagttgtttcatacccc

SEQ ID NO: 4596 - DNA, 33 bp, homo sapiens
aaggaatagaaatgaarttagttgaaagttgag

SEQ ID NO: 4597 - DNA, 33 bp, homo sapiens
gagattttaagaaaccsaaattcctaagcctta

SEQ ID NO: 4598 - DNA, 33 bp, homo sapiens
tcaagcactgtagaaarttgtaccttcgaaaca

SEQ ID NO: 4599 - DNA, 33 bp, homo sapiens
tcatgcatcgctggaargagagtagaatggtat

SEQ ID NO: 4600 - DNA, 33 bp, homo sapiens
tgacttctaatgactarctcaaagtcaaggcaa

SEQ ID NO: 4601 - DNA, 33 bp, homo sapiens
caccctctctgtctccrccaacaggtacaagtc

SEQ ID NO: 4602 - DNA, 33 bp, homo sapiens
ttctgcagagagaactragtcagactgtgaaga

SEQ ID NO: 4603 - DNA, 33 bp, homo sapiens
atccatgacaaggaaayaaaccataaggagaga

SEQ ID NO: 4604 - DNA, 33 bp, homo sapiens
gggtattatcattatcyaggtggtccgggatga

SEQ ID NO: 4605 - DNA, 33 bp, homo sapiens
ttggcacccagtaggcrcaaaaacagaaagaag

SEQ ID NO: 4606 - DNA, 33 bp, homo sapiens
tgcttaaaatagtgccyagtacatagtaagttt

SEQ ID NO: 4607 - DNA, 33 bp, homo sapiens
acccttgtttttgcaaytcgagaacagaacaaa

SEQ ID NO: 4608 - DNA, 33 bp, homo sapiens
ggagagcattaagacamgtacctaaggcatgtg

SEQ ID NO: 4609 - DNA, 33 bp, homo sapiens
ccctgaatgagataagyaactgagcatggtgcc

SEQ ID NO: 4610 - DNA, 33 bp, homo sapiens
tgctccaagtgatgtayggctttggggtctcta

SEQ ID NO: 4611 - DNA, 33 bp, homo sapiens
actttattgtggagtaraatttttgccttttta

SEQ ID NO: 4612 - DNA, 33 bp, homo sapiens
ctctgggtagcatagtkaagtatttaatggatc

SEQ ID NO: 4613 - DNA, 33 bp, homo sapiens
gatccatactcaccaayatataatacaaatgag

SEQ ID NO: 4614 - DNA, 33 bp, homo sapiens
tatagagagcttttcaytctatcctttctgctt

SEQ ID NO: 4615 - DNA, 33 bp, homo sapiens
acataagagagaaattwaaccacacagaaatcc

SEQ ID NO: 4616 - DNA, 33 bp, homo sapiens
ttgttatgatgaattasctatctgtccattgaa

SEQ ID NO: 4617 - DNA, 33 bp, homo sapiens
aaagataagcttcatamcaactccaaatgataa

SEQ ID NO: 4618 - DNA, 33 bp, homo sapiens
gaaatttctcaatcacygcgaagaattcacagc

SEQ ID NO: 4619 - DNA, 33 bp, homo sapiens
tcataacaattgataawgacggaccaggggata

SEQ ID NO: 4620 - DNA, 33 bp, homo sapiens
agcacatagcaaatcawatcaggccaaagtttt

SEQ ID NO: 4621 - DNA, 33 bp, homo sapiens
accaagattcagatatyaaaaatgcagctgctc

SEQ ID NO: 4622 - DNA, 33 bp, homo sapiens
taattgttaaaagcaargtgtatgtagttacca

SEQ ID NO: 4623 - DNA, 33 bp, homo sapiens
atgaattcctgagctaygttgaatgacttgggt

SEQ ID NO: 4624 - DNA, 33 bp, homo sapiens
tgttcagatttcccccrgaatgcaaaatgtgag

SEQ ID NO: 4625 - DNA, 33 bp, homo sapiens
agttgttacagtgagaragaatgaaggcctgag

SEQ ID NO: 4626 - DNA, 33 bp, homo sapiens
aagttaacagagtacargatttccaaatgtggg

SEQ ID NO: 4627 - DNA, 33 bp, homo sapiens
attcaagtacaccctasaaagagcagttactta

SEQ ID NO: 4628 - DNA, 33 bp, homo sapiens
gatggttacactaaaakctgatctcaccactag

SEQ ID NO: 4629 - DNA, 33 bp, homo sapiens
aagcacttaggatataycactccaattttttta

SEQ ID NO: 4630 - DNA, 33 bp, homo sapiens
tcatggtgatgaagccrcagcaaatttccagag

SEQ ID NO: 4631 - DNA, 33 bp, homo sapiens
aagccagatggtcacaygctaaggaatgaatgg

SEQ ID NO: 4632 - DNA, 33 bp, homo sapiens
gacagaatctagggaartggaacataggacaag

SEQ ID NO: 4633 - DNA, 33 bp, homo sapiens
ttttcatctactggtcwcgctgttcacaacaat

SEQ ID NO: 4634 - DNA, 33 bp, homo sapiens
cttgtcagaaagaagawcacagataaagatgta

SEQ ID NO: 4635 - DNA, 33 bp, homo sapiens
ttctccattatataccrgaacagcatgaagatc

SEQ ID NO: 4636 - DNA, 33 bp, homo sapiens
agggggtatagagtggsattttgtaagagtagt

SEQ ID NO: 4637 - DNA, 33 bp, homo sapiens
acacattaatcattgartatcaaacttaaatgt

SEQ ID NO: 4638 - DNA, 33 bp, homo sapiens
gggattggccatttgayaatgcatttctattaa

SEQ ID NO: 4639 - DNA, 33 bp, homo sapiens
gcccttactctccaacyacaggaccttgcatta

SEQ ID NO: 4640 - DNA, 33 bp, homo sapiens
ttaaacaatacctccastagaagtcataagatt

SEQ ID NO: 4641 - DNA, 33 bp, homo sapiens
aagaaaaatgtgtaacscttaaagagcatttgt

SEQ ID NO: 4642 - DNA, 33 bp, homo sapiens
aacatttcctgaggctyaactgtatgctagcca

SEQ ID NO: 4643 - DNA, 33 bp, homo sapiens
ttaaaatctgatagaawggtgtagacacagatt

SEQ ID NO: 4644 - DNA, 33 bp, homo sapiens
ctctaagccctggtgcracagacatcaccacac

SEQ ID NO: 4645 - DNA, 33 bp, homo sapiens
acatccagaccatcacyaataattctatatgac

SEQ ID NO: 4646 - DNA, 33 bp, homo sapiens
aggacactatcctaagmaaactaatgaaggaat

SEQ ID NO: 4647 - DNA, 33 bp, homo sapiens
tcagacattaaaaaaarttagctaagctgcaaa

SEQ ID NO: 4648 - DNA, 33 bp, homo sapiens
catttacaaaagttgcrgaccaccattagctgt

SEQ ID NO: 4649 - DNA, 33 bp, homo sapiens
acagataaggaactagrccttaacaattttatg

SEQ ID NO: 4650 - DNA, 33 bp, homo sapiens
gcactctccaatgacaytcttaacaagtatagt

SEQ ID NO: 4651 - DNA, 33 bp, homo sapiens
tatctgtgagaacacgraaaatttgcgacctat

SEQ ID NO: 4652 - DNA, 33 bp, homo sapiens
taggaaaacattagaamaattcagatccagcca

SEQ ID NO: 4653 - DNA, 33 bp, homo sapiens
tagaatatgccattagmcatcaagcctaaagcc

SEQ ID NO: 4654 - DNA, 33 bp, homo sapiens
gaaagctaagagcacaratataaccagtagttt

SEQ ID NO: 4655 - DNA, 33 bp, homo sapiens
tatttggaaattgtggraccaacattaaattag

SEQ ID NO: 4656 - DNA, 33 bp, homo sapiens
agaccaaactgattgcmgagttacattccttag

SEQ ID NO: 4657 - DNA, 33 bp, homo sapiens
actaagaggtgacaagyctaagggccaaaggcc

SEQ ID NO: 4658 - DNA, 33 bp, homo sapiens
atgaagccaggcacgamtattagatttccattc

SEQ ID NO: 4659 - DNA, 33 bp, homo sapiens
tcttttacttgtaacarggtactcctcagccag

SEQ ID NO: 4660 - DNA, 33 bp, homo sapiens
agctattaaagttgagraagtaaaagaatctat

SEQ ID NO: 4661 - DNA, 33 bp, homo sapiens
gtgcttgacaagtacaraattaagcgagttaaa

SEQ ID NO: 4662 - DNA, 33 bp, homo sapiens
ctgataatagaaaccamctccacacaaattgtt

SEQ ID NO: 4663 - DNA, 33 bp, homo sapiens
tttgtagtttgcattgyattgctgttgaacagc

SEQ ID NO: 4664 - DNA, 33 bp, homo sapiens
ttgaatatgccttatcraaaatgcctgggacca

SEQ ID NO: 4665 - DNA, 33 bp, homo sapiens
taatccgtgtcttgcaygctcatattccttctg

SEQ ID NO: 4666 - DNA, 33 bp, homo sapiens
cacaggtgtgattaagwcatgagttacgtgtcc

SEQ ID NO: 4667 - DNA, 33 bp, homo sapiens
gcacaaacttgttaagmctctgttagttacctc

SEQ ID NO: 4668 - DNA, 33 bp, homo sapiens
aaaatcagaatgaacayggtaaaaaaggaaaga

SEQ ID NO: 4669 - DNA, 33 bp, homo sapiens
ttgctggaaatccaaawagagtgtgcggtttag

SEQ ID NO: 4670 - DNA, 33 bp, homo sapiens
taagttcatatggaaaytaaaggaatccagaat

SEQ ID NO: 4671 - DNA, 33 bp, homo sapiens
agagcctggcaggtcargaatctagcacaggga

SEQ ID NO: 4672 - DNA, 33 bp, homo sapiens
tattcttccttgtagayggatttcatttttgga

SEQ ID NO: 4673 - DNA, 33 bp, homo sapiens
acgctgcttccattgayatagtgcagaataaat

SEQ ID NO: 4674 - DNA, 33 bp, homo sapiens
ggttgacctgtctccaygtaagattacctaaat

SEQ ID NO: 4675 - DNA, 33 bp, homo sapiens
atcctgatacttcttasaagatttgcaatgaag

SEQ ID NO: 4676 - DNA, 33 bp, homo sapiens
atcaataattcaaatgkaggaactaagacttca

SEQ ID NO: 4677 - DNA, 33 bp, homo sapiens
gtgtttccagacaaacwctgacagttttagctt

SEQ ID NO: 4678 - DNA, 33 bp, homo sapiens
gaatgggagctgagaargtctgggaagattcat

SEQ ID NO: 4679 - DNA, 33 bp, homo sapiens
tatccattgtttacaartccatagaattattag

SEQ ID NO: 4680 - DNA, 33 bp, homo sapiens
tcctcttatccaacggyaattccgtaattgtta

SEQ ID NO: 4681 - DNA, 33 bp, homo sapiens
aaagatcttacccaaayttgcttctcgatttaa

SEQ ID NO: 4682 - DNA, 33 bp, homo sapiens
atggcatgggtcgagaygggaaacgtggccagg

SEQ ID NO: 4683 - DNA, 33 bp, homo sapiens
cagtacatttattgcargtttattttatgctta

SEQ ID NO: 4684 - DNA, 33 bp, homo sapiens
ggtttccagaatacaayggctacagactggagg

SEQ ID NO: 4685 - DNA, 33 bp, homo sapiens
ctcttccccctcaaaamaagtggatgcagaaaa

SEQ ID NO: 4686 - DNA, 33 bp, homo sapiens
atgtcacaagcagacartgatatgaacaattgc

SEQ ID NO: 4687 - DNA, 33 bp, homo sapiens
gaaagtgcagcagtacrgatagccattaatgtt

SEQ ID NO: 4688 - DNA, 33 bp, homo sapiens
aactcatgcttttaaartgaaatcatgtgtttg

SEQ ID NO: 4689 - DNA, 33 bp, homo sapiens
ctcatcaaggtttacakattgaatcaccaacaa

SEQ ID NO: 4690 - DNA, 33 bp, homo sapiens
attccaaaatattctasaaaaaaggcatctaca

SEQ ID NO: 4691 - DNA, 33 bp, homo sapiens
tgttataagcattccargtgccaagtgccaaca

SEQ ID NO: 4692 - DNA, 33 bp, homo sapiens
tctggccataagcaacmaatttctatttataca

SEQ ID NO: 4693 - DNA, 33 bp, homo sapiens
tggggtttatggaagcrccaaaacatgatgtag

SEQ ID NO: 4694 - DNA, 33 bp, homo sapiens
ttgtaagtctcagcaaytgacgaggctaggctg

SEQ ID NO: 4695 - DNA, 33 bp, homo sapiens
tatgcattcctgatagrcaactcttaggctgga

SEQ ID NO: 4696 - DNA, 33 bp, homo sapiens
tgttggtcccaagaacrgtctcatatatgcctc

SEQ ID NO: 4697 - DNA, 33 bp, homo sapiens
gtgtgcttgtatcatcragtcaacccaattaat

SEQ ID NO: 4698 - DNA, 33 bp, homo sapiens
ttttatttcatccatakcagcttatgagatttt

SEQ ID NO: 4699 - DNA, 33 bp, homo sapiens
aggctttttgaaacaaycagagttttctttcaa

SEQ ID NO: 4700 - DNA, 33 bp, homo sapiens
aaaagggaactctttawgcattgttgggaatgt

SEQ ID NO: 4701 - DNA, 33 bp, homo sapiens
aaacctttagctgcacraaggaaaaaaaagagt

SEQ ID NO: 4702 - DNA, 33 bp, homo sapiens
tagagagggcttgtcaytattgttattgaacaa

SEQ ID NO: 4703 - DNA, 33 bp, homo sapiens
tcctttgtctatcagcyacttttgttagtctta

SEQ ID NO: 4704 - DNA, 33 bp, homo sapiens
aatttcttcctacctaygtgacatttcactatt

SEQ ID NO: 4705 - DNA, 33 bp, homo sapiens
ttccagcaatcccccawtctagatgctgacagc

SEQ ID NO: 4706 - DNA, 33 bp, homo sapiens
ctgacaggatactcatraaaacccggtgggacc

SEQ ID NO: 4707 - DNA, 33 bp, homo sapiens
agagtttgacaagaaawgtgaaaataatagcta

SEQ ID NO: 4708 - DNA, 33 bp, homo sapiens
agggagcaattttaccwctgagaagttcaaatg

SEQ ID NO: 4709 - DNA, 33 bp, homo sapiens
catattcttagatgcayagaaaaggactagaag

SEQ ID NO: 4710 - DNA, 33 bp, homo sapiens
gtgaacccaaaatagcrgccaatgaaagcaaac

SEQ ID NO: 4711 - DNA, 33 bp, homo sapiens
tacttatctcctccccragtgtccagctggtga

SEQ ID NO: 4712 - DNA, 33 bp, homo sapiens
caatttgaaactagaawgaagacattttcgcac

SEQ ID NO: 4713 - DNA, 33 bp, homo sapiens
aaaaaaaaccactacaytagagcacttacctaa

SEQ ID NO: 4714 - DNA, 33 bp, homo sapiens
agtgactataccgcagmatttcagactctggag

SEQ ID NO: 4715 - DNA, 33 bp, homo sapiens
gactagcaattttttaygcagattgtacttgcc

SEQ ID NO: 4716 - DNA, 33 bp, homo sapiens
caaactatttcgctgaygagaggtacaatgtaa

SEQ ID NO: 4717 - DNA, 33 bp, homo sapiens
tgacttgccctggatayacattgaatactctct

SEQ ID NO: 4718 - DNA, 33 bp, homo sapiens
gccagaccaagtaatamagccttcaatcctaag

SEQ ID NO: 4719 - DNA, 33 bp, homo sapiens
aaattaaactttgaaaktatagttgagactata

SEQ ID NO: 4720 - DNA, 33 bp, homo sapiens
tgccatgtggtctcaamacaacagctcattgaa

SEQ ID NO: 4721 - DNA, 33 bp, homo sapiens
cactatgggcctagaaragaaagtttatgtgtt

SEQ ID NO: 4722 - DNA, 33 bp, homo sapiens
tttaaaaatttcttccraagtccaattaaagat

SEQ ID NO: 4723 - DNA, 33 bp, homo sapiens
ttctaaaacttccagaraagagctccttacaat

SEQ ID NO: 4724 - DNA, 33 bp, homo sapiens
agagaaatgccctcaargaagagccaaatatcc

SEQ ID NO: 4725 - DNA, 33 bp, homo sapiens
tatcttcttcacactawaacaaatgtgtcccat

SEQ ID NO: 4726 - DNA, 33 bp, homo sapiens
tattttcacagtgttargggggatcatataata

SEQ ID NO: 4727 - DNA, 33 bp, homo sapiens
aaattcatatggaaccraaatggagcctgaata

SEQ ID NO: 4728 - DNA, 33 bp, homo sapiens
tttagatgctgggatayaatcgagagcaacaga

SEQ ID NO: 4729 - DNA, 33 bp, homo sapiens
atagtagaatgactaasactaatgcaaagtctc

SEQ ID NO: 4730 - DNA, 33 bp, homo sapiens
aatccatctaggcttaygtacctttggaggtga

SEQ ID NO: 4731 - DNA, 33 bp, homo sapiens
atgtcctcaagctaaaytctgaacattcaagat

SEQ ID NO: 4732 - DNA, 33 bp, homo sapiens
aaatgaaacagtgtacwggaagcctgctaataa

SEQ ID NO: 4733 - DNA, 33 bp, homo sapiens
tttgaggtaaagtttaygtatagcgaaatgcag

SEQ ID NO: 4734 - DNA, 33 bp, homo sapiens
caaaaaccttccaaagmaagctagatcactctc

SEQ ID NO: 4735 - DNA, 33 bp, homo sapiens
actgggaggaagtaagragtagtgactaaggaa

SEQ ID NO: 4736 - DNA, 33 bp, homo sapiens
agggagggagcaaggartaattcagtcgtacat

SEQ ID NO: 4737 - DNA, 33 bp, homo sapiens
ctaccctgtttgatggmaaaacatgcgattcca

SEQ ID NO: 4738 - DNA, 33 bp, homo sapiens
gtgtgctcatctgtagmagtggaggcagaagtt

SEQ ID NO: 4739 - DNA, 33 bp, homo sapiens
aaaataaccagtacaaraagtccattcaaacaa

SEQ ID NO: 4740 - DNA, 33 bp, homo sapiens
aaaatctcacaaatgcrattcaagtaagttgaa

SEQ ID NO: 4741 - DNA, 33 bp, homo sapiens
tgacactgaaattggtraagatacattaatact

SEQ ID NO: 4742 - DNA, 33 bp, homo sapiens
atgtcgtttgcttaacrtacaccctggaaagag

SEQ ID NO: 4743 - DNA, 33 bp, homo sapiens
aggtatttaactgcaaraaatagcagaatagcc

SEQ ID NO: 4744 - DNA, 33 bp, homo sapiens
gtgaggattaatgcgakaatgtgtgtcagcact

SEQ ID NO: 4745 - DNA, 33 bp, homo sapiens
aatgcttcttcctcacycccattgtcctggtgg

SEQ ID NO: 4746 - DNA, 33 bp, homo sapiens
ttctgacacccaaaacmcattttatgcttagag

SEQ ID NO: 4747 - DNA, 33 bp, homo sapiens
ttttgccaaaattatcracatgccaggtaagat

SEQ ID NO: 4748 - DNA, 33 bp, homo sapiens
ggtaaccaaacgaaaasaggctactactacaaa

SEQ ID NO: 4749 - DNA, 33 bp, homo sapiens
gaccacatcaaagaaasgaccatagacataaga

SEQ ID NO: 4750 - DNA, 33 bp, homo sapiens
taaggaactattcttcygaactgatttcttagc

SEQ ID NO: 4751 - DNA, 33 bp, homo sapiens
tttagcataaccccacrgtagaatcaataacgg

SEQ ID NO: 4752 - DNA, 33 bp, homo sapiens
taccaaggattaagcaytcaataaaaggtcatt

SEQ ID NO: 4753 - DNA, 33 bp, homo sapiens
caaaatgcttaaaagawatcacctggcactcat

SEQ ID NO: 4754 - DNA, 33 bp, homo sapiens
taaactcccgttagaargagtagaatgactggg

SEQ ID NO: 4755 - DNA, 33 bp, homo sapiens
acccattcttttccacmgtcaatgaaatcccac

SEQ ID NO: 4756 - DNA, 33 bp, homo sapiens
aacagttcctcacaggraaacattccactccag

SEQ ID NO: 4757 - DNA, 33 bp, homo sapiens
gaatatgcctgtgtaaycactaccccaaacaat

SEQ ID NO: 4758 - DNA, 33 bp, homo sapiens
tacacaaagataagaaracgtggctcctggcct

SEQ ID NO: 4759 - DNA, 33 bp, homo sapiens
ttatgtagaaagtatgrataaagaaagagagga

SEQ ID NO: 4760 - DNA, 33 bp, homo sapiens
taggtgtacaacacacrctaggggcaatatgct

SEQ ID NO: 4761 - DNA, 33 bp, homo sapiens
gttagacttgtattgcmatccgaaagctctcct

SEQ ID NO: 4762 - DNA, 33 bp, homo sapiens
cttaagccagcctcaaygttcctttggagatcc

SEQ ID NO: 4763 - DNA, 33 bp, homo sapiens
agtttatcagccccaargtaggtattgtcctat

SEQ ID NO: 4764 - DNA, 33 bp, homo sapiens
gctcagaaaatcggcaycttacataagatagga

SEQ ID NO: 4765 - DNA, 33 bp, homo sapiens
tggttgcatactcactsagagactcattggcat

SEQ ID NO: 4766 - DNA, 33 bp, homo sapiens
gagctgccaatcacctraacaatcaccttctaa

SEQ ID NO: 4767 - DNA, 33 bp, homo sapiens
tgtcaatagcctacaayctgcaataaactatta

SEQ ID NO: 4768 - DNA, 33 bp, homo sapiens
gtttgtctgattaacaratgaagaaaatgagat

SEQ ID NO: 4769 - DNA, 33 bp, homo sapiens
tatggaaaaaccaagarggacagtgctaatcac

SEQ ID NO: 4770 - DNA, 33 bp, homo sapiens
atcagttgagataaaartagaactccatttctc

SEQ ID NO: 4771 - DNA, 33 bp, homo sapiens
aggctaataggtttgayaaatttgtatttttct

SEQ ID NO: 4772 - DNA, 33 bp, homo sapiens
aaattaataaacgtcaraatagtgtattcctat

SEQ ID NO: 4773 - DNA, 33 bp, homo sapiens
ggaataacctccttgargcactaagcatgaaaa

SEQ ID NO: 4774 - DNA, 33 bp, homo sapiens
ttccagtcatactgacrggacatgattttccaa

SEQ ID NO: 4775 - DNA, 33 bp, homo sapiens
ttagaacatggagacartgaatcaaaaactcat

SEQ ID NO: 4776 - DNA, 33 bp, homo sapiens
ttgtatccattaaaaartgctttgtccttgtca

SEQ ID NO: 4777 - DNA, 33 bp, homo sapiens
taacagtgactggctamaaataatttaattctg

SEQ ID NO: 4778 - DNA, 33 bp, homo sapiens
caataggtgtaaataaycttaagtgcgcacata

SEQ ID NO: 4779 - DNA, 33 bp, homo sapiens
tttatttctcctagcaygtacccatttacctgg

SEQ ID NO: 4780 - DNA, 33 bp, homo sapiens
tcttacctggaattaargtgggaaataattcac

SEQ ID NO: 4781 - DNA, 33 bp, homo sapiens
gattaaaacccaacaarctcgagtgctggggtc

SEQ ID NO: 4782 - DNA, 33 bp, homo sapiens
aggatacagactggtaytacaaggtaaagataa

SEQ ID NO: 4783 - DNA, 33 bp, homo sapiens
agcccacaagggttaaytcgccaggcattcgat

SEQ ID NO: 4784 - DNA, 33 bp, homo sapiens
ttaagtgtcagcactasgtttatggtccctacc

SEQ ID NO: 4785 - DNA, 33 bp, homo sapiens
cttagctccacgtagayattttaaagtatcaga

SEQ ID NO: 4786 - DNA, 33 bp, homo sapiens
ttccctgaattgaaaaygtgttacttgcattag

SEQ ID NO: 4787 - DNA, 33 bp, homo sapiens
cagcatgagcaacccargaaaaaatgagaaata

SEQ ID NO: 4788 - DNA, 33 bp, homo sapiens
aggcctgccaagaaccraagccgctgctccacc

SEQ ID NO: 4789 - DNA, 33 bp, homo sapiens
ctgtgatctgtcagcargaacttacttcaaggg

SEQ ID NO: 4790 - DNA, 33 bp, homo sapiens
tcacagggcagtattgyagatgaaacagttcta

SEQ ID NO: 4791 - DNA, 33 bp, homo sapiens
aattacattttagtaarctgtgaagcccatgaa

SEQ ID NO: 4792 - DNA, 33 bp, homo sapiens
agaatggcgaaatacaracctatggtagaagat

SEQ ID NO: 4793 - DNA, 33 bp, homo sapiens
agatgatcctggagcaygttcagggaggagggc

SEQ ID NO: 4794 - DNA, 33 bp, homo sapiens
ttgtctgtttttgccaygagagctcgttttctg

SEQ ID NO: 4795 - DNA, 33 bp, homo sapiens
gccccacacattcacaycttttaaaatggtccc

SEQ ID NO: 4796 - DNA, 33 bp, homo sapiens
aagtgctgggttggaaycagttcggcatttgcc

SEQ ID NO: 4797 - DNA, 33 bp, homo sapiens
gaaaatcctctaactcmactggtcatattccac

SEQ ID NO: 4798 - DNA, 33 bp, homo sapiens
ctgaccaaaactgttasagcttagcctgatgaa

SEQ ID NO: 4799 - DNA, 33 bp, homo sapiens
tctcactggggagaatsaactgtggatgaacaa

SEQ ID NO: 4800 - DNA, 33 bp, homo sapiens
aactggaagaaacaacrattatttactcctaaa

SEQ ID NO: 4801 - DNA, 33 bp, homo sapiens
gcaaatggagatgatartaagtgaatacagccc

SEQ ID NO: 4802 - DNA, 33 bp, homo sapiens
gggactgaggagtcaastccgttttggtcttaa

SEQ ID NO: 4803 - DNA, 33 bp, homo sapiens
cttgaagtggaaggaaygaataggtgtgtgcct

SEQ ID NO: 4804 - DNA, 33 bp, homo sapiens
tttcacatattgtaacwagcgtatctttccaca

SEQ ID NO: 4805 - DNA, 33 bp, homo sapiens
ggcgacagagttagaayctttctcaaataaaca

SEQ ID NO: 4806 - DNA, 33 bp, homo sapiens
tccccaccgggacaggwatattttgaggaagtc

SEQ ID NO: 4807 - DNA, 33 bp, homo sapiens
ggcagaaggttcagcamcccttggctccaaagg

SEQ ID NO: 4808 - DNA, 33 bp, homo sapiens
cttcactggaaacacamaaaatgaaaaggtgtc

SEQ ID NO: 4809 - DNA, 33 bp, homo sapiens
gctgtaaaacattatcrcagatttactagccta

SEQ ID NO: 4810 - DNA, 33 bp, homo sapiens
tcagtccaacagcaaargaactcaatatctgac

SEQ ID NO: 4811 - DNA, 33 bp, homo sapiens
gacaagagtgaaagcaractgtgaataagcaag

SEQ ID NO: 4812 - DNA, 33 bp, homo sapiens
atatctaaggagcaaarggaagaatgtaacttt

SEQ ID NO: 4813 - DNA, 33 bp, homo sapiens
tgtatatttggcatctraccagaaatatacagt

SEQ ID NO: 4814 - DNA, 33 bp, homo sapiens
cccagcaaaagaaagamtaagggctaggtcgtt

SEQ ID NO: 4815 - DNA, 33 bp, homo sapiens
cacctcgaggcattgtraaaataaaattatgtc

SEQ ID NO: 4816 - DNA, 33 bp, homo sapiens
gacaccagtagctttcmcgactaaagtaacctc

SEQ ID NO: 4817 - DNA, 33 bp, homo sapiens
actgttcataaggatargcacattcggctgtaa

SEQ ID NO: 4818 - DNA, 33 bp, homo sapiens
ttttgtgctatgaaaamagaatgtgaagaaaat

SEQ ID NO: 4819 - DNA, 33 bp, homo sapiens
gagtaatgtgttaaagratgagaaaagagcatg

SEQ ID NO: 4820 - DNA, 33 bp, homo sapiens
aagttccttcctggaargttctctattcaggta

SEQ ID NO: 4821 - DNA, 33 bp, homo sapiens
aggtgttcccaaataamatactctttcaatgaa

SEQ ID NO: 4822 - DNA, 33 bp, homo sapiens
aagaagttatcacctaratcacatttatgtacc

SEQ ID NO: 4823 - DNA, 33 bp, homo sapiens
ccaatgtgaatatgacraatttcaaaggacaag

SEQ ID NO: 4824 - DNA, 33 bp, homo sapiens
tcttactccaggcaatsagcagaaagtgcatta

SEQ ID NO: 4825 - DNA, 33 bp, homo sapiens
tctagaaaatgtttgayaatatgcctgttttct

SEQ ID NO: 4826 - DNA, 33 bp, homo sapiens
atggttattagttctcmagctagtccacactga

SEQ ID NO: 4827 - DNA, 33 bp, homo sapiens
tagaatgttctaaagcmaactccaaatgtcagc

SEQ ID NO: 4828 - DNA, 33 bp, homo sapiens
gagcagaattccagaaraactgaagttggtggt

SEQ ID NO: 4829 - DNA, 33 bp, homo sapiens
ccttaatcaaaaacaaygaggtttgagctagta

SEQ ID NO: 4830 - DNA, 33 bp, homo sapiens
cacttgtttgaaaaggyatggttaagtgaggca

SEQ ID NO: 4831 - DNA, 33 bp, homo sapiens
agaaaggctactttccragaaaattactctctg

SEQ ID NO: 4832 - DNA, 33 bp, homo sapiens
aatgaaccagtttgtaraatgtttgttatgctt

SEQ ID NO: 4833 - DNA, 33 bp, homo sapiens
tttttaaatgtttctaygtctttttctcagtga

SEQ ID NO: 4834 - DNA, 33 bp, homo sapiens
attcaatggaattttaycattgatcattaccat

SEQ ID NO: 4835 - DNA, 33 bp, homo sapiens
aacctgattctaaataygtacagagggtaatgg

SEQ ID NO: 4836 - DNA, 33 bp, homo sapiens
agataaatttcctaatmatgtttgtgctttaga

SEQ ID NO: 4837 - DNA, 33 bp, homo sapiens
ctattccagttgaacaycaagagaaaaacaatg

SEQ ID NO: 4838 - DNA, 33 bp, homo sapiens
tataaaactagcaagcwctgtacagcaaaggag

SEQ ID NO: 4839 - DNA, 33 bp, homo sapiens
aaagagaggcctataawagaacccaattatctg

SEQ ID NO: 4840 - DNA, 33 bp, homo sapiens
atgtgaagtagtagaargatggttaagaaagaa

SEQ ID NO: 4841 - DNA, 33 bp, homo sapiens
attatcagacataaatraccatattcataaatt

SEQ ID NO: 4842 - DNA, 33 bp, homo sapiens
ggcaatttaatcaaacmcatcaaagaatcttag

SEQ ID NO: 4843 - DNA, 33 bp, homo sapiens
tggtcttgtcaaccaayggtcaatacctatccc

SEQ ID NO: 4844 - DNA, 33 bp, homo sapiens
tggagcacagtaggaarattttgtacctacatt

SEQ ID NO: 4845 - DNA, 33 bp, homo sapiens
aatagagtatattcagyagagagttatgttcag

SEQ ID NO: 4846 - DNA, 33 bp, homo sapiens
catcctagtttgtttakagaaatccaagtctac

SEQ ID NO: 4847 - DNA, 33 bp, homo sapiens
ttcacttacttgattarattttgatatgactca

SEQ ID NO: 4848 - DNA, 33 bp, homo sapiens
gcgcagaatagtaagcrctcttccagtttttcc

SEQ ID NO: 4849 - DNA, 33 bp, homo sapiens
gggattcaggagcaagsctataccatcagcagt

SEQ ID NO: 4850 - DNA, 33 bp, homo sapiens
gtgtgaggtgaaagcgsaagagggagtggtgat

SEQ ID NO: 4851 - DNA, 33 bp, homo sapiens
gagctatgacaaggaaraaggttagagaataaa

SEQ ID NO: 4852 - DNA, 33 bp, homo sapiens
gctgcctggactgttayattaggaaggattgtg

SEQ ID NO: 4853 - DNA, 33 bp, homo sapiens
agagggattaggcacaraatattgaaggtgcag

SEQ ID NO: 4854 - DNA, 33 bp, homo sapiens
ttccatctaaaaaatayagtggcttttgctttg

SEQ ID NO: 4855 - DNA, 33 bp, homo sapiens
atgagaaaatcagaaargcatatattcggtgat

SEQ ID NO: 4856 - DNA, 33 bp, homo sapiens
ttaactgcattccaggrcaatattcaacagtat

SEQ ID NO: 4857 - DNA, 33 bp, homo sapiens
tgaccttctgtactcayggacttccaatgtata

SEQ ID NO: 4858 - DNA, 33 bp, homo sapiens
atgaacagccagttatragagcatgtggataaa

SEQ ID NO: 4859 - DNA, 33 bp, homo sapiens
agaaagccatgatctcyatgatcgagccactgc

SEQ ID NO: 4860 - DNA, 33 bp, homo sapiens
ttctgttaaaataaackgctttctcacaaaact

SEQ ID NO: 4861 - DNA, 33 bp, homo sapiens
atcttaaacactgaggmaacccatctggctaat

SEQ ID NO: 4862 - DNA, 33 bp, homo sapiens
acaataacgaaaaatargtgtttataggtgatc

SEQ ID NO: 4863 - DNA, 33 bp, homo sapiens
taaatactaaatcttcractgaaaaatctagga

SEQ ID NO: 4864 - DNA, 33 bp, homo sapiens
atttgcctaactattckcaggtatctatgaata

SEQ ID NO: 4865 - DNA, 33 bp, homo sapiens
tgtaaggaaataactgyattggagagaagagaa

SEQ ID NO: 4866 - DNA, 33 bp, homo sapiens
aagttaaaaaaaactgycaatgagttaacttaa

SEQ ID NO: 4867 - DNA, 33 bp, homo sapiens
cacgtaacaatatgagkcagattctaatatcat

SEQ ID NO: 4868 - DNA, 33 bp, homo sapiens
ttatgaagaaattataygtccttattctcattt

SEQ ID NO: 4869 - DNA, 33 bp, homo sapiens
agctccacatttacackggatacccttggtcac

SEQ ID NO: 4870 - DNA, 33 bp, homo sapiens
gttatctgtctttgaaragcatattactgtctt

SEQ ID NO: 4871 - DNA, 33 bp, homo sapiens
tttaagcttaatgacartggacttagcaggaca

SEQ ID NO: 4872 - DNA, 33 bp, homo sapiens
gacactgacttccctcygaaaatcttttcatac

SEQ ID NO: 4873 - DNA, 33 bp, homo sapiens
ggatttcgtggtcctaygctaagttcagaaagg

SEQ ID NO: 4874 - DNA, 33 bp, homo sapiens
gatgatggatcggccamcagttcctaaaaaggg

SEQ ID NO: 4875 - DNA, 33 bp, homo sapiens
ggcaatagtttgaaaasaggcaattgactagcg

SEQ ID NO: 4876 - DNA, 33 bp, homo sapiens
gttttaagaaacttaaytggatacctcactcct

SEQ ID NO: 4877 - DNA, 33 bp, homo sapiens
aagcttgaaaatcagcratgatgactgcacttt

SEQ ID NO: 4878 - DNA, 33 bp, homo sapiens
atcttctccagaggtarcacttgactggcttac

SEQ ID NO: 4879 - DNA, 33 bp, homo sapiens
ggttaaaaggttctgartcacctgctcagttta

SEQ ID NO: 4880 - DNA, 33 bp, homo sapiens
agacatctctggagccygaacaatccatttact

SEQ ID NO: 4881 - DNA, 33 bp, homo sapiens
atcatctggtcaaaacyatgagttcctggagga

SEQ ID NO: 4882 - DNA, 33 bp, homo sapiens
gggaatcattgggtacrcacatcttcaaatttc

SEQ ID NO: 4883 - DNA, 33 bp, homo sapiens
cttttctttccttgccrgctctctccctctctc

SEQ ID NO: 4884 - DNA, 33 bp, homo sapiens
ttgggaagcatttccakgtattttaaaggacat

SEQ ID NO: 4885 - DNA, 33 bp, homo sapiens
gttcaagcttgccagartctctatacagcatct

SEQ ID NO: 4886 - DNA, 33 bp, homo sapiens
attactgccacatgaaraacatttaagcatggc

SEQ ID NO: 4887 - DNA, 33 bp, homo sapiens
gctctgtcatccccaaygggaagctgcaatacc

SEQ ID NO: 4888 - DNA, 33 bp, homo sapiens
aaacatttgaataccayccactaatctgatgtg

SEQ ID NO: 4889 - DNA, 33 bp, homo sapiens
ttccagaatatgtgacyatctttaggtctaaga

SEQ ID NO: 4890 - DNA, 33 bp, homo sapiens
gcataaagtcctgtgcycagagaacagtctggt

SEQ ID NO: 4891 - DNA, 33 bp, homo sapiens
catggtaggagagttayaggaacacagtgggag

SEQ ID NO: 4892 - DNA, 33 bp, homo sapiens
ttgagaacctctgtcarcactatgaacacatca

SEQ ID NO: 4893 - DNA, 33 bp, homo sapiens
gatccccaccttttaasgcttcttcagagattt

SEQ ID NO: 4894 - DNA, 33 bp, homo sapiens
taaaagtgaaaaaggawggtggttaggtcacaa

SEQ ID NO: 4895 - DNA, 33 bp, homo sapiens
acatgaaccattttaastctcataaatacacat

SEQ ID NO: 4896 - DNA, 33 bp, homo sapiens
tggtgtggagtggagaycttggaaaattccaga

SEQ ID NO: 4897 - DNA, 33 bp, homo sapiens
tatcctgacaaagaagkagatgtctgttctcat

SEQ ID NO: 4898 - DNA, 33 bp, homo sapiens
atttaaagcatataaarcaccatgcaagagagc

SEQ ID NO: 4899 - DNA, 33 bp, homo sapiens
gtttcaaaaggtgagamtaacaggagatttggg

SEQ ID NO: 4900 - DNA, 33 bp, homo sapiens
ctaaaacaagctgtgcrgagaaaatttcagagc

SEQ ID NO: 4901 - DNA, 33 bp, homo sapiens
tttcacctttgtactayagatgaacttctttcc

SEQ ID NO: 4902 - DNA, 33 bp, homo sapiens
ggagactgaagatcacrgagataattttttcca

SEQ ID NO: 4903 - DNA, 33 bp, homo sapiens
cacttgcctacaaatarattagaatctgaagaa

SEQ ID NO: 4904 - DNA, 33 bp, homo sapiens
tggagagagggctcacwacattatccttgaagc

SEQ ID NO: 4905 - DNA, 33 bp, homo sapiens
atatcacccttgacaaygataataatcagagtg

SEQ ID NO: 4906 - DNA, 33 bp, homo sapiens
aaaaaactgaatacaaraactctgaaagaaagt

SEQ ID NO: 4907 - DNA, 33 bp, homo sapiens
cttaaccaaagatcacrcaaaataggcaataga

SEQ ID NO: 4908 - DNA, 33 bp, homo sapiens
tccgtgccatgtttaasagctataataccgcga

SEQ ID NO: 4909 - DNA, 33 bp, homo sapiens
acacagtgcttcttgasctagcccatatgtggt

SEQ ID NO: 4910 - DNA, 33 bp, homo sapiens
atggatccggagcatayaaatagcatggctttg

SEQ ID NO: 4911 - DNA, 33 bp, homo sapiens
ggtcatgttttctttasggccacttgtcctttg

SEQ ID NO: 4912 - DNA, 33 bp, homo sapiens
aatccagtcattagaawgggcaaggttcacagt

SEQ ID NO: 4913 - DNA, 33 bp, homo sapiens
atgcatcaggcatttcmataattactttacatg

SEQ ID NO: 4914 - DNA, 33 bp, homo sapiens
tcagtaaatgttactgraaccattggaaatcct

SEQ ID NO: 4915 - DNA, 33 bp, homo sapiens
agccacctctcccggcsgaacattcttacatac

SEQ ID NO: 4916 - DNA, 33 bp, homo sapiens
tagctaggaattatggwattgatcattgtggtg

SEQ ID NO: 4917 - DNA, 33 bp, homo sapiens
ttgatgattcctttgaygttgtatttaaaatct

SEQ ID NO: 4918 - DNA, 33 bp, homo sapiens
catcaaaattgtaaaargacgtgaatactttga

SEQ ID NO: 4919 - DNA, 33 bp, homo sapiens
tgcctgagacatgtacrataaagcctgtgattt

SEQ ID NO: 4920 - DNA, 33 bp, homo sapiens
gcaacactgagaaataraaagcttggagaaaaa

SEQ ID NO: 4921 - DNA, 33 bp, homo sapiens
gagcaaatgataggcayatgaaatacccaacat

SEQ ID NO: 4922 - DNA, 33 bp, homo sapiens
atatactgccttttcakgggagagttagtgagc

SEQ ID NO: 4923 - DNA, 33 bp, homo sapiens
aaacataagcaactcaytatttttcaaaaaaga

SEQ ID NO: 4924 - DNA, 33 bp, homo sapiens
catttctttctataccratgactcaagtgagga

SEQ ID NO: 4925 - DNA, 33 bp, homo sapiens
tccaatcaggcttggawggtatgctcattctgt

SEQ ID NO: 4926 - DNA, 33 bp, homo sapiens
atgtgtcagtattacasacctgtttcaaatcac

SEQ ID NO: 4927 - DNA, 33 bp, homo sapiens
gccatagcaaagttgarcgaaacagcctgagag

SEQ ID NO: 4928 - DNA, 33 bp, homo sapiens
acctttggcatttgaaygacagttgtagagact

SEQ ID NO: 4929 - DNA, 33 bp, homo sapiens
tatctttttgatgataygtggaggtagacttgc

SEQ ID NO: 4930 - DNA, 33 bp, homo sapiens
tctgcagaatgacaaamcattagggaaacctga

SEQ ID NO: 4931 - DNA, 33 bp, homo sapiens
acttgctaatgggtaaygtgtacctgttgacca

SEQ ID NO: 4932 - DNA, 33 bp, homo sapiens
cttaattctctaaaaamgatttgtgttgtataa

SEQ ID NO: 4933 - DNA, 33 bp, homo sapiens
tattactaggaaactgyaggaggctatcaccac

SEQ ID NO: 4934 - DNA, 33 bp, homo sapiens
tagcagagaggaaccayggagaaatcagagact

SEQ ID NO: 4935 - DNA, 33 bp, homo sapiens
aatcccaacagaaggcmagaaaacaacaggata

SEQ ID NO: 4936 - DNA, 33 bp, homo sapiens
gttttgatggaagaagyctccagggttacaaat

SEQ ID NO: 4937 - DNA, 33 bp, homo sapiens
aataatatttgtaacayaatcttcattgtctta

SEQ ID NO: 4938 - DNA, 33 bp, homo sapiens
tgaatcagagttctaartgtatatgacttaatg

SEQ ID NO: 4939 - DNA, 33 bp, homo sapiens
ccttgtcttcatccaartatttcttttcgcttt

SEQ ID NO: 4940 - DNA, 33 bp, homo sapiens
taaagctatctgatacyatgttaagcaataaat

SEQ ID NO: 4941 - DNA, 33 bp, homo sapiens
tttcacttaaaattaaygatctccagttccaat

SEQ ID NO: 4942 - DNA, 33 bp, homo sapiens
taggttgtcacctttayagagaggtagatggta

SEQ ID NO: 4943 - DNA, 33 bp, homo sapiens
gacacctagtattaacmatcataagtccaccct

SEQ ID NO: 4944 - DNA, 33 bp, homo sapiens
gaagctgtttgtatcamgacggcaaatccctca

SEQ ID NO: 4945 - DNA, 33 bp, homo sapiens
taaggtacaaggagcawtgaggtgcctttgtgc

SEQ ID NO: 4946 - DNA, 33 bp, homo sapiens
ccgttgctcaccttcakgcaatttgtcaccatc

SEQ ID NO: 4947 - DNA, 33 bp, homo sapiens
tgggaagaagataaaaygacaagctacattctt

SEQ ID NO: 4948 - DNA, 33 bp, homo sapiens
ttgacctgttctgtagmatttgttgtcttagtt

SEQ ID NO: 4949 - DNA, 33 bp, homo sapiens
gacatctattgttccasgcttatattaatctgt

SEQ ID NO: 4950 - DNA, 33 bp, homo sapiens
atgtagaaagatgaagrttcaggcattacctgc

SEQ ID NO: 4951 - DNA, 33 bp, homo sapiens
ctaattcatttctcacrctgcaatgatactaaa

SEQ ID NO: 4952 - DNA, 33 bp, homo sapiens
caaatgatatagtccaytggaaactactaacag

SEQ ID NO: 4953 - DNA, 33 bp, homo sapiens
aaatatcgatcaaaaargtcatgttgttccagg

SEQ ID NO: 4954 - DNA, 33 bp, homo sapiens
acaaagaatattagcayacaatgtgatatgtga

SEQ ID NO: 4955 - DNA, 33 bp, homo sapiens
taaccattaggtttcamctagaagactcaaaga

SEQ ID NO: 4956 - DNA, 33 bp, homo sapiens
taagaaggagttaggawggttttctaagcaaaa

SEQ ID NO: 4957 - DNA, 33 bp, homo sapiens
taaagcaagtgccattraagcaataatttatat

SEQ ID NO: 4958 - DNA, 33 bp, homo sapiens
gtgctttccaaaatccrataccacagggcccct

SEQ ID NO: 4959 - DNA, 33 bp, homo sapiens
tatcataggactgttayagcgattaaatataat

SEQ ID NO: 4960 - DNA, 33 bp, homo sapiens
agcagtttgtggtaaamctgcttcacatggatt

SEQ ID NO: 4961 - DNA, 33 bp, homo sapiens
cagatcatccatttgayatagagacctcatctc

SEQ ID NO: 4962 - DNA, 33 bp, homo sapiens
ccagatggaattaaaakgcagagaaagggcaaa

SEQ ID NO: 4963 - DNA, 33 bp, homo sapiens
tggtgcctacactaacwgcatttacattctttt

SEQ ID NO: 4964 - DNA, 33 bp, homo sapiens
cctctctgccttttctwgtctaaagacaggccc

SEQ ID NO: 4965 - DNA, 33 bp, homo sapiens
tcatagtgtaggggaarggtgtgatcaaggaaa

SEQ ID NO: 4966 - DNA, 33 bp, homo sapiens
taaaatgtatccgttgyatatagcattattgag

SEQ ID NO: 4967 - DNA, 33 bp, homo sapiens
tgagcaagcagaaggasagtatagacaactcca

SEQ ID NO: 4968 - DNA, 33 bp, homo sapiens
cctcaccaggtatgacrgaccagtttgcgatta

SEQ ID NO: 4969 - DNA, 33 bp, homo sapiens
aaagaaatgcacttacrcaaatttggaagatag

SEQ ID NO: 4970 - DNA, 33 bp, homo sapiens
tgagatgtgacttccaraattattcctggggtt

SEQ ID NO: 4971 - DNA, 33 bp, homo sapiens
acatggtaaaaagaaaycattagtgtccaatat

SEQ ID NO: 4972 - DNA, 33 bp, homo sapiens
acaggtgcctgggagaraagctaatgcaaagat

SEQ ID NO: 4973 - DNA, 33 bp, homo sapiens
aatcacatcatgtgtcrgaagaaaattgtcacc

SEQ ID NO: 4974 - DNA, 33 bp, homo sapiens
aagaacaggactgtccyaaatcaagcgggatta

SEQ ID NO: 4975 - DNA, 33 bp, homo sapiens
caaattagacacaccayactttgatcaagcttt

SEQ ID NO: 4976 - DNA, 33 bp, homo sapiens
ggacagaagaatggcayggcccggtggcggtgg

SEQ ID NO: 4977 - DNA, 33 bp, homo sapiens
ttcccacctctccaccraaactgctgctaaatc

SEQ ID NO: 4978 - DNA, 33 bp, homo sapiens
tgagcatattgactaaygtccctttcgaggggt

SEQ ID NO: 4979 - DNA, 33 bp, homo sapiens
atgctgatatgaaggamaaagctgataaatgct

SEQ ID NO: 4980 - DNA, 33 bp, homo sapiens
ttatttatttttttcasaagagtcttgctagaa

SEQ ID NO: 4981 - DNA, 33 bp, homo sapiens
tcaagagatggattatyactagcctttgcctac

SEQ ID NO: 4982 - DNA, 33 bp, homo sapiens
aagggatggagttaggwatacaagatttaactc

SEQ ID NO: 4983 - DNA, 33 bp, homo sapiens
ctcattataggtgaggyaccattttaagtgctt

SEQ ID NO: 4984 - DNA, 33 bp, homo sapiens
tacacaggtgcctggamaccctgagaattttat

SEQ ID NO: 4985 - DNA, 33 bp, homo sapiens
tctatttattcgttacyggagaggaagtgattc

SEQ ID NO: 4986 - DNA, 33 bp, homo sapiens
tgagacttacagataamcctcttggagtggtga

SEQ ID NO: 4987 - DNA, 33 bp, homo sapiens
aaaattcggatcctgayaattagaagagcaaca

SEQ ID NO: 4988 - DNA, 33 bp, homo sapiens
tgtgagagcagcactgkaatcactaaaatgtgc

SEQ ID NO: 4989 - DNA, 33 bp, homo sapiens
gctgcaagtctatggamgtatttcaaagagaat

SEQ ID NO: 4990 - DNA, 33 bp, homo sapiens
cacttctggtttcttasgacatactgtcacttc

SEQ ID NO: 4991 - DNA, 33 bp, homo sapiens
gtcaaagttttacttaygttcatcacttcttca

SEQ ID NO: 4992 - DNA, 33 bp, homo sapiens
caatcctgagcaagagracaacaaagctggaag

SEQ ID NO: 4993 - DNA, 33 bp, homo sapiens
ttatagatatgctacamcttctgtaattgtccc

SEQ ID NO: 4994 - DNA, 33 bp, homo sapiens
ggtgatatgagatttcraagcaatataagggaa

SEQ ID NO: 4995 - DNA, 33 bp, homo sapiens
cactgcagcaaggtctsaatatttttaatatga

SEQ ID NO: 4996 - DNA, 33 bp, homo sapiens
tattgtggggtttcaaratttctctatccaaca

SEQ ID NO: 4997 - DNA, 33 bp, homo sapiens
aaggcatatgtatcatkaacttagtctactggt

SEQ ID NO: 4998 - DNA, 33 bp, homo sapiens
aacaagatctttttagratctaggcagaaatga

SEQ ID NO: 4999 - DNA, 33 bp, homo sapiens
ggcaaaagcaacaaccracttctgaagctgctg

SEQ ID NO: 5000 - DNA, 33 bp, homo sapiens
ctgttacaataagccaytcgttggcttgcttca

SEQ ID NO: 5001 - DNA, 33 bp, homo sapiens
attgatccatctggaawctttaaacaatgcatc

SEQ ID NO: 5002 - DNA, 33 bp, homo sapiens
aattgatggaaaattcycataatctataaatgg

SEQ ID NO: 5003 - DNA, 33 bp, homo sapiens
tatttttatacatttcrctgctgactagatttc

SEQ ID NO: 5004 - DNA, 33 bp, homo sapiens
agctttaccctcaaggmcataaattgctatcac

SEQ ID NO: 5005 - DNA, 33 bp, homo sapiens
ttatcgcaaggaagtakgagtctatattcaaag

SEQ ID NO: 5006 - DNA, 33 bp, homo sapiens
aaaagaacagtaagcaracgaaagaataggtca

SEQ ID NO: 5007 - DNA, 33 bp, homo sapiens
tgagtgtagtttaacaraagcccagagaatagt

SEQ ID NO: 5008 - DNA, 33 bp, homo sapiens
aatggtgtaatatttgyagtatgaacatcatca

SEQ ID NO: 5009 - DNA, 33 bp, homo sapiens
acgtaaaaagtataaayggcagccttgaagtaa

SEQ ID NO: 5010 - DNA, 33 bp, homo sapiens
tctttggtaagcattaygtggtcaaagctctga

SEQ ID NO: 5011 - DNA, 33 bp, homo sapiens
tcatctggttgactcaygtcttgttctatttaa

SEQ ID NO: 5012 - DNA, 33 bp, homo sapiens
tgactttatcaaagtcragatgccaagcattaa

SEQ ID NO: 5013 - DNA, 33 bp, homo sapiens
ggtgacacagccacatsaatttgcacagttctg

SEQ ID NO: 5014 - DNA, 33 bp, homo sapiens
tatctctctgctcaaasctctttcctcatctcc

SEQ ID NO: 5015 - DNA, 33 bp, homo sapiens
ccttcatcagtaaccartaaaatcacaaacagc

SEQ ID NO: 5016 - DNA, 33 bp, homo sapiens
agttgaggaattagccyagataaaatacaagcg

SEQ ID NO: 5017 - DNA, 33 bp, homo sapiens
atttcgagtgataaaamttccacatttccagac

SEQ ID NO: 5018 - DNA, 33 bp, homo sapiens
attaagactgatgatayagaatagatggaatga

SEQ ID NO: 5019 - DNA, 33 bp, homo sapiens
ttggtgggcatataacratactagaaaacaaaa

SEQ ID NO: 5020 - DNA, 33 bp, homo sapiens
ggagagtctaacactasgatattacccataaaa

SEQ ID NO: 5021 - DNA, 33 bp, homo sapiens
gtggttcactctcaaaytgtgccctaagctgct

SEQ ID NO: 5022 - DNA, 33 bp, homo sapiens
aaataagtttcatatasagtgattagtaagttt

SEQ ID NO: 5023 - DNA, 33 bp, homo sapiens
ttgaggtccatgttgtyaagatgtaaaataatt

SEQ ID NO: 5024 - DNA, 33 bp, homo sapiens
aagatgcccagtttcaractcttctccttactc

SEQ ID NO: 5025 - DNA, 33 bp, homo sapiens
gtctctagcttgcaaasgtgcttgggatgttcg

SEQ ID NO: 5026 - DNA, 33 bp, homo sapiens
aggttagagtgaatccraaatgagtacgaccac

SEQ ID NO: 5027 - DNA, 33 bp, homo sapiens
ttcaagacttttgacargtgaagttcagcagag

SEQ ID NO: 5028 - DNA, 33 bp, homo sapiens
ttttcttcttggatccmatttttgaatttaaat

SEQ ID NO: 5029 - DNA, 33 bp, homo sapiens
gtggtggatattataascatcctgatttgatca

SEQ ID NO: 5030 - DNA, 33 bp, homo sapiens
aaatcttaaatccacargatgaattacagacta

SEQ ID NO: 5031 - DNA, 33 bp, homo sapiens
aacaaaataatagttcmatttcctgtttggtat

SEQ ID NO: 5032 - DNA, 33 bp, homo sapiens
cggggctgagaatcacygatctaatcctacctt

SEQ ID NO: 5033 - DNA, 33 bp, homo sapiens
ttggactcctgtgcagkatactaggatgttgga

SEQ ID NO: 5034 - DNA, 33 bp, homo sapiens
gctgatatgtagaagastaatctttgtattctc

SEQ ID NO: 5035 - DNA, 33 bp, homo sapiens
ttgttgattgatggtayataagaaggcaattta

SEQ ID NO: 5036 - DNA, 33 bp, homo sapiens
ccagaggcattgggaasaagagtttcaggggaa

SEQ ID NO: 5037 - DNA, 33 bp, homo sapiens
agacagcttctaacatsactcccagtgacctag

SEQ ID NO: 5038 - DNA, 33 bp, homo sapiens
ttctcaatatgggtgayacagaggtgaataagt

SEQ ID NO: 5039 - DNA, 33 bp, homo sapiens
cctcttatctgatttamagtgttgaaagatgaa

SEQ ID NO: 5040 - DNA, 33 bp, homo sapiens
atatgtgtgagaatagsatgtacaatttggcat

SEQ ID NO: 5041 - DNA, 33 bp, homo sapiens
atcgaaatgactggtargcaaacaagtgaaatt

SEQ ID NO: 5042 - DNA, 33 bp, homo sapiens
taattactaaaagcatyaagcccctggtatgag

SEQ ID NO: 5043 - DNA, 33 bp, homo sapiens
gtgaatgaggccattcrgaaaagaccacaaagt

SEQ ID NO: 5044 - DNA, 33 bp, homo sapiens
agagggtagagaataamtgaaaatgatggcact

SEQ ID NO: 5045 - DNA, 33 bp, homo sapiens
tacaaccactaatcggkaaaatacggataggga

SEQ ID NO: 5046 - DNA, 33 bp, homo sapiens
ggctgggccaaagaacrcattgctaaatagcac

SEQ ID NO: 5047 - DNA, 33 bp, homo sapiens
acatgggtcacataagraagccttaaagttaac

SEQ ID NO: 5048 - DNA, 33 bp, homo sapiens
tatcttcatgtcattcwcttttttaactcccac

SEQ ID NO: 5049 - DNA, 33 bp, homo sapiens
ccccaaacacttttccyaacaacaatttggtac

SEQ ID NO: 5050 - DNA, 33 bp, homo sapiens
ttggagttccatagcaygataattttcagtttt

SEQ ID NO: 5051 - DNA, 33 bp, homo sapiens
aggacatcagaaatcaragaagtacacttattt

SEQ ID NO: 5052 - DNA, 33 bp, homo sapiens
aaataaaaagctgtaaytgtcaactaatctaac

SEQ ID NO: 5053 - DNA, 33 bp, homo sapiens
ttttccgtagaataaaytgcccctctctatacc

SEQ ID NO: 5054 - DNA, 33 bp, homo sapiens
attgtcatctaaagagratgtgtattggtgtta

SEQ ID NO: 5055 - DNA, 33 bp, homo sapiens
ttgccaatttatctaaygggttgttgattgaaa

SEQ ID NO: 5056 - DNA, 33 bp, homo sapiens
tggacgcccccattagwacttgaactttgagtt

SEQ ID NO: 5057 - DNA, 33 bp, homo sapiens
taacacattcaaactaractgtcctgtgttatc

SEQ ID NO: 5058 - DNA, 33 bp, homo sapiens
aaatatgaagagtaaaygaggctttgagactat

SEQ ID NO: 5059 - DNA, 33 bp, homo sapiens
tctaggcttaaatagawccaatgcccaatatga

SEQ ID NO: 5060 - DNA, 33 bp, homo sapiens
tctcgctcaataaagayctgcaggtgaattcgc

SEQ ID NO: 5061 - DNA, 33 bp, homo sapiens
agtatgtagctatccargttaagtgcccacagg

SEQ ID NO: 5062 - DNA, 33 bp, homo sapiens
taggcaaagaactctaycaaaggaacatctgtc

SEQ ID NO: 5063 - DNA, 33 bp, homo sapiens
agtaagtagccagtgartagccctcattgatag

SEQ ID NO: 5064 - DNA, 33 bp, homo sapiens
cttctgtccaaccccasgatggatgccagtgct

SEQ ID NO: 5065 - DNA, 33 bp, homo sapiens
atctaaagtccaatcartctccttactcagaat

SEQ ID NO: 5066 - DNA, 33 bp, homo sapiens
tgccacgtgcagatgawatatattcagacaaat

SEQ ID NO: 5067 - DNA, 33 bp, homo sapiens
agcccaggaaagtgcamcaggcctctgttttcc

SEQ ID NO: 5068 - DNA, 33 bp, homo sapiens
catgaggtaaagaaaakcttcatgtgagtgtgg

SEQ ID NO: 5069 - DNA, 33 bp, homo sapiens
gggagttatgtgcttgsaactcttctgggcccc

SEQ ID NO: 5070 - DNA, 33 bp, homo sapiens
aaacgggaatctttacrgactgtctctcatgtt

SEQ ID NO: 5071 - DNA, 33 bp, homo sapiens
ccataagatatacaaascacttggaaaatgtga

SEQ ID NO: 5072 - DNA, 33 bp, homo sapiens
ggctgcactcttatccyggaaggctgtgggtca

SEQ ID NO: 5073 - DNA, 33 bp, homo sapiens
tggattgctgtctgaayaaatcattggtttggg

SEQ ID NO: 5074 - DNA, 33 bp, homo sapiens
aatcatttcagtgagcraagcactttttttctt

SEQ ID NO: 5075 - DNA, 33 bp, homo sapiens
gccatacaaggggctaygtgacaaccagaagga

SEQ ID NO: 5076 - DNA, 33 bp, homo sapiens
cttaaaccatattcccrgaagcagaacctaagg

SEQ ID NO: 5077 - DNA, 33 bp, homo sapiens
gaggaggaaagtgccartagggtgacctctgct

SEQ ID NO: 5078 - DNA, 33 bp, homo sapiens
catacatatctgacatsagaaaagcaggcccta

SEQ ID NO: 5079 - DNA, 33 bp, homo sapiens
ggttgagttgaattcasaatgacttaggacagt

SEQ ID NO: 5080 - DNA, 33 bp, homo sapiens
tagaaacacaaaattayacagtcactttggagg

SEQ ID NO: 5081 - DNA, 33 bp, homo sapiens
acatagagttcaactgraatgacagtccctaat

SEQ ID NO: 5082 - DNA, 33 bp, homo sapiens
agtgacgaaaaggagcrgacaaagacaacagcg

SEQ ID NO: 5083 - DNA, 33 bp, homo sapiens
atggggagaattaaacyctgtcacggagaaagt

SEQ ID NO: 5084 - DNA, 33 bp, homo sapiens
taaaagtgcctcacaawctccctcaggctgccc

SEQ ID NO: 5085 - DNA, 33 bp, homo sapiens
gcacttagagaaagcaytcaacttccagaacct

SEQ ID NO: 5086 - DNA, 33 bp, homo sapiens
ccatcttcctctgtacscttgccaccaaatcac

SEQ ID NO: 5087 - DNA, 33 bp, homo sapiens
gctccgtattggggacycacaaggagtacagtc

SEQ ID NO: 5088 - DNA, 33 bp, homo sapiens
taggtatgtaaatcagsactcaccaacagttga

SEQ ID NO: 5089 - DNA, 33 bp, homo sapiens
ttttctctccatgagcratgactctgcagttaa

SEQ ID NO: 5090 - DNA, 33 bp, homo sapiens
actttccaaatatatgycaaactgttgtccaaa

SEQ ID NO: 5091 - DNA, 33 bp, homo sapiens
gatatatctgctcaaamactttcttatttttta

SEQ ID NO: 5092 - DNA, 33 bp, homo sapiens
tgcagttctgtatttayaagtgggataaggaat

SEQ ID NO: 5093 - DNA, 33 bp, homo sapiens
gaggagaagtcacgggraaggtaggaaatgccg

SEQ ID NO: 5094 - DNA, 33 bp, homo sapiens
gatgaaaccttaatacmagttaagatcaaatta

SEQ ID NO: 5095 - DNA, 33 bp, homo sapiens
tctgtttcatcctttgyagaggagctcctgcac

SEQ ID NO: 5096 - DNA, 33 bp, homo sapiens
tgatgtattgattgtcragcttcaaattctgaa

SEQ ID NO: 5097 - DNA, 33 bp, homo sapiens
acaggcagaggtagcaycaaaaagggaccctca

SEQ ID NO: 5098 - DNA, 33 bp, homo sapiens
acacctgctgctggaawcactgggaacttcact

SEQ ID NO: 5099 - DNA, 33 bp, homo sapiens
actggttccggcagaargcctgcttgtgttttc

SEQ ID NO: 5100 - DNA, 33 bp, homo sapiens
aaattaaggatttgaartgaacatgacagaagt

SEQ ID NO: 5101 - DNA, 33 bp, homo sapiens
ataggaactcagaaaaytggtgttgtcttgggc

SEQ ID NO: 5102 - DNA, 33 bp, homo sapiens
tcagtatctcctgagamagttacctcttagaag

SEQ ID NO: 5103 - DNA, 33 bp, homo sapiens
atgtgagatatcttacyagcaagaggcacaaag

SEQ ID NO: 5104 - DNA, 33 bp, homo sapiens
tacgagctgactttaaycacagcatggtcatat

SEQ ID NO: 5105 - DNA, 33 bp, homo sapiens
tcaaaaatgtcaaaatyatgcaaagttcctcag

SEQ ID NO: 5106 - DNA, 33 bp, homo sapiens
aatggaggcaaaagaayagcggagatttgtact

SEQ ID NO: 5107 - DNA, 33 bp, homo sapiens
tacaatgaggactaagraaagtgttagttcatt

SEQ ID NO: 5108 - DNA, 33 bp, homo sapiens
agaaactgctcaactawcaggcaaaataatcag

SEQ ID NO: 5109 - DNA, 33 bp, homo sapiens
ttgtccactaaggtcayggtgaatcctctttct

SEQ ID NO: 5110 - DNA, 33 bp, homo sapiens
tctgtgtagcattacasgcccaaacccatgtac

SEQ ID NO: 5111 - DNA, 33 bp, homo sapiens
atgttgaactgaatgasccataacagctaatgt

SEQ ID NO: 5112 - DNA, 33 bp, homo sapiens
gccagaagaatctggaygaagaaaagagcatca

SEQ ID NO: 5113 - DNA, 33 bp, homo sapiens
gtcactaatggatcacsatcttctttcttgacg

SEQ ID NO: 5114 - DNA, 33 bp, homo sapiens
gttgtgactacagcaartgtctgctaacagatg

SEQ ID NO: 5115 - DNA, 33 bp, homo sapiens
cttccagcagaagcacrataacttcctcagcat

SEQ ID NO: 5116 - DNA, 33 bp, homo sapiens
ctgtcaacctaaataaygatcagagaggctctc

SEQ ID NO: 5117 - DNA, 33 bp, homo sapiens
aatatttcataaattgwactcaagggagctcct

SEQ ID NO: 5118 - DNA, 33 bp, homo sapiens
tacagtacctgccataygtgcggagagtccaag

SEQ ID NO: 5119 - DNA, 33 bp, homo sapiens
gattaattcctgacaamcttcttacatatagaa

SEQ ID NO: 5120 - DNA, 33 bp, homo sapiens
tcatatgagagttatcsaaaattagaccaaaat

SEQ ID NO: 5121 - DNA, 33 bp, homo sapiens
ggaagaaaaaggacaaygtgtgaagcaaagagg

SEQ ID NO: 5122 - DNA, 33 bp, homo sapiens
gaatagttatgcccggragctggaaaagtttca

SEQ ID NO: 5123 - DNA, 33 bp, homo sapiens
cgcggcagctcccagaygttgatgttttgtttt

SEQ ID NO: 5124 - DNA, 33 bp, homo sapiens
aacgtgtacaggtataygcaaaagggaaaagga

SEQ ID NO: 5125 - DNA, 33 bp, homo sapiens
taaggcagaggatttayaggagaatatggccca

SEQ ID NO: 5126 - DNA, 33 bp, homo sapiens
taacaaggatgccagcragattggattcgggcc

SEQ ID NO: 5127 - DNA, 33 bp, homo sapiens
catctccctcatagaamagagtaaccgccccca

SEQ ID NO: 5128 - DNA, 33 bp, homo sapiens
gctcctggatgacaggmagatatggctgcggct

SEQ ID NO: 5129 - DNA, 33 bp, homo sapiens
ctgtcattactttgaayaagccatttgaccttt

SEQ ID NO: 5130 - DNA, 33 bp, homo sapiens
agatcttcatatggcargtttcctttgtcattt

SEQ ID NO: 5131 - DNA, 33 bp, homo sapiens
atcagagttaacttacyagcaccagaagatgtg

SEQ ID NO: 5132 - DNA, 33 bp, homo sapiens
caatttgtgtagttaaygcaagggttctgagat

SEQ ID NO: 5133 - DNA, 33 bp, homo sapiens
ttgaatacaatgattaygcaagtttgtagatta

SEQ ID NO: 5134 - DNA, 33 bp, homo sapiens
tatctgttgcatattayggaatgacaacaaaga

SEQ ID NO: 5135 - DNA, 33 bp, homo sapiens
gataagggcctaatgaygacctcacattgttcc

SEQ ID NO: 5136 - DNA, 33 bp, homo sapiens
acaacttagcttcatcractcttcatttcccaa

SEQ ID NO: 5137 - DNA, 33 bp, homo sapiens
caagaggtgaaagcaayccaaatattcactgac

SEQ ID NO: 5138 - DNA, 33 bp, homo sapiens
tcaaggagacatactcragatggaatcaccgtt

SEQ ID NO: 5139 - DNA, 33 bp, homo sapiens
ggtgattgactgaacargataggccttaattta

SEQ ID NO: 5140 - DNA, 33 bp, homo sapiens
gagagaactcacagaaraacataggtcctccta

SEQ ID NO: 5141 - DNA, 33 bp, homo sapiens
atccttttggtaagtayagattctgaaatagat

SEQ ID NO: 5142 - DNA, 33 bp, homo sapiens
tcctcatatgattgtcscttctgccaagtgctt

SEQ ID NO: 5143 - DNA, 33 bp, homo sapiens
caaagccatgaactggwagtcagtagacctgga

SEQ ID NO: 5144 - DNA, 33 bp, homo sapiens
gctttgaataacataargggaaaattcacccag

SEQ ID NO: 5145 - DNA, 33 bp, homo sapiens
gtaaatgctggttttcrccctcactcagtaaat

SEQ ID NO: 5146 - DNA, 33 bp, homo sapiens
tgtcttttcagccaaayctcaccgcaagacacc

SEQ ID NO: 5147 - DNA, 33 bp, homo sapiens
tgttgtgcttttaataygctctttagctgttcc

SEQ ID NO: 5148 - DNA, 33 bp, homo sapiens
atagtatcatagtgtaraaagtagagagtacat

SEQ ID NO: 5149 - DNA, 33 bp, homo sapiens
ccacagaattacggaaraaactcagtcagttac

SEQ ID NO: 5150 - DNA, 33 bp, homo sapiens
ggctctaggaatgaacratcatttatagcagca

SEQ ID NO: 5151 - DNA, 33 bp, homo sapiens
gaaaataggggctccaygtactttccagaggtt

SEQ ID NO: 5152 - DNA, 33 bp, homo sapiens
agggctgatgcatctcraggtaatactacatta

SEQ ID NO: 5153 - DNA, 33 bp, homo sapiens
ggttagaattaggggaygtagacggtgaagcat

SEQ ID NO: 5154 - DNA, 33 bp, homo sapiens
ccttagtcatgcacccrcttactcatctctgcc

SEQ ID NO: 5155 - DNA, 33 bp, homo sapiens
cacaaatcctgttccartgataatcaagctgtg

SEQ ID NO: 5156 - DNA, 33 bp, homo sapiens
gaatgaagcctcaggargaagagtagatgctgg

SEQ ID NO: 5157 - DNA, 33 bp, homo sapiens
ttgaactgagttaagaygtcctggcctgatctg

SEQ ID NO: 5158 - DNA, 33 bp, homo sapiens
tcctagccccatcaatkactctgccaacatggc

SEQ ID NO: 5159 - DNA, 33 bp, homo sapiens
tggaagcataaactacmacaagattttcagaag

SEQ ID NO: 5160 - DNA, 33 bp, homo sapiens
aatattacagatcatcragactgaaatggagca

SEQ ID NO: 5161 - DNA, 33 bp, homo sapiens
cttactgccaggagaartgttgggcagacttat

SEQ ID NO: 5162 - DNA, 33 bp, homo sapiens
gttactcagtgttggcrcttctccaactaggat

SEQ ID NO: 5163 - DNA, 33 bp, homo sapiens
catctgtagaccccacygtggaatcctactgtc

SEQ ID NO: 5164 - DNA, 33 bp, homo sapiens
aaacaagtgagctaatyaagcatacaatgacca

SEQ ID NO: 5165 - DNA, 33 bp, homo sapiens
agttctaacttccagtractctcataaacccat

SEQ ID NO: 5166 - DNA, 33 bp, homo sapiens
ccaagtgaagttcagasaagtgaccaaccatgt

SEQ ID NO: 5167 - DNA, 33 bp, homo sapiens
gaagggacaataggtayaaaagcccagagagat

SEQ ID NO: 5168 - DNA, 33 bp, homo sapiens
aggaaaactaaccaccyagtatatgcagagaga

SEQ ID NO: 5169 - DNA, 33 bp, homo sapiens
cgactctcctgcctgargtcaaacatactccat

SEQ ID NO: 5170 - DNA, 33 bp, homo sapiens
cctattataatgcttgyaaaatcaggagtgctt

SEQ ID NO: 5171 - DNA, 33 bp, homo sapiens
tggcaggatccaaggargaattgatgtatctac

SEQ ID NO: 5172 - DNA, 33 bp, homo sapiens
aaggccagctaacactraaaagttgtgatggtt

SEQ ID NO: 5173 - DNA, 33 bp, homo sapiens
actttacagagaggatragtgacgttttcaagg

SEQ ID NO: 5174 - DNA, 33 bp, homo sapiens
tgaaagagaccctagaratcatttagtctactc

SEQ ID NO: 5175 - DNA, 33 bp, homo sapiens
atagagtgacaatggakgtggtcagtgaaggcc

SEQ ID NO: 5176 - DNA, 33 bp, homo sapiens
gctacatatatatcaaytcagggcttctgaact

SEQ ID NO: 5177 - DNA, 33 bp, homo sapiens
aaatacaaaagaacctyacccaaatgataacaa

SEQ ID NO: 5178 - DNA, 33 bp, homo sapiens
gcactgggtgagggcasaaggagttcctacaca

SEQ ID NO: 5179 - DNA, 33 bp, homo sapiens
ttattgcattacatctyaaacttcaggacataa

SEQ ID NO: 5180 - DNA, 33 bp, homo sapiens
gtctcttatgactgctracatgaaaggaacttc

SEQ ID NO: 5181 - DNA, 33 bp, homo sapiens
cttgtttaaaaatatarcctcattcactctatg

SEQ ID NO: 5182 - DNA, 33 bp, homo sapiens
gctgagacaggggaacygtgggcaaagaggtcc

SEQ ID NO: 5183 - DNA, 33 bp, homo sapiens
ggtggtctagtttaagmaccagaaacttggact

SEQ ID NO: 5184 - DNA, 33 bp, homo sapiens
gttcttatcaagcttamggtcatacagctaggg

SEQ ID NO: 5185 - DNA, 33 bp, homo sapiens
ttatctgtacaagggaragctggctaatgagat

SEQ ID NO: 5186 - DNA, 33 bp, homo sapiens
tttcaattttgccatcrctgagcctttacagtt

SEQ ID NO: 5187 - DNA, 33 bp, homo sapiens
tactcctccatgctcaygactttccagttcaac

SEQ ID NO: 5188 - DNA, 33 bp, homo sapiens
acctttccaagagtagmattgtaatacagaggt

SEQ ID NO: 5189 - DNA, 33 bp, homo sapiens
aactcagccacgatgamccggccgcaataagag

SEQ ID NO: 5190 - DNA, 33 bp, homo sapiens
agggagcatggcggacrgcctaccaggagagcc

SEQ ID NO: 5191 - DNA, 33 bp, homo sapiens
attctcaagtcccaccscggagtgttgatttag

SEQ ID NO: 5192 - DNA, 33 bp, homo sapiens
tatgaccagtcttaggraggaacacttcaaggt

SEQ ID NO: 5193 - DNA, 33 bp, homo sapiens
tgctaacacctttctarcacttgctaatctttc

SEQ ID NO: 5194 - DNA, 33 bp, homo sapiens
gtctatatcttttacaktctgtctagagatact

SEQ ID NO: 5195 - DNA, 33 bp, homo sapiens
ttggaggaagcctaagmagttcacaattgctat

SEQ ID NO: 5196 - DNA, 33 bp, homo sapiens
ccctgggcaggtgatcraacctctctgtgcttc

SEQ ID NO: 5197 - DNA, 33 bp, homo sapiens
tatgagaatgtcatgartaaatttgaactttga

SEQ ID NO: 5198 - DNA, 33 bp, homo sapiens
gataatcgacatgtatwagttgattgaatgaag

SEQ ID NO: 5199 - DNA, 33 bp, homo sapiens
tttgccagtcacttgayaagccatatgctttaa

SEQ ID NO: 5200 - DNA, 33 bp, homo sapiens
aaactctgcatttgtamgaggataccaaattgc

SEQ ID NO: 5201 - DNA, 33 bp, homo sapiens
gagtgagcggaagaaamagctgacaacatcgaa

SEQ ID NO: 5202 - DNA, 33 bp, homo sapiens
tgaacaaacctacagaygacttcggctcccagt

SEQ ID NO: 5203 - DNA, 33 bp, homo sapiens
ctatctcttcctttaakgagcttcaaatttagg

SEQ ID NO: 5204 - DNA, 33 bp, homo sapiens
ccagtaccagagttgcycttgtagatctccact

SEQ ID NO: 5205 - DNA, 33 bp, homo sapiens
gcacaggtttttagtcrcacagggttatcctca

SEQ ID NO: 5206 - DNA, 33 bp, homo sapiens
ctggtaaatttttttckccagagggcaggtctt

SEQ ID NO: 5207 - DNA, 33 bp, homo sapiens
gatttttaaaataccartgaacagccacatacc

SEQ ID NO: 5208 - DNA, 33 bp, homo sapiens
taagaaattacaagcayggtttgataaatctag

SEQ ID NO: 5209 - DNA, 33 bp, homo sapiens
gacaatttctgaggcawcaccctcttcatgaga

SEQ ID NO: 5210 - DNA, 33 bp, homo sapiens
ttttgccaccttgtggraacagtctaatgctaa

SEQ ID NO: 5211 - DNA, 33 bp, homo sapiens
aggacttgttatctaamcttaatttgcttgata

SEQ ID NO: 5212 - DNA, 33 bp, homo sapiens
ctgcagtcacttccacragaaatggctgctggc

SEQ ID NO: 5213 - DNA, 33 bp, homo sapiens
ctccaagctccatgaargtaaggacctttctgc

SEQ ID NO: 5214 - DNA, 33 bp, homo sapiens
aacccatgagttttacsaagaaacccaagagtc

SEQ ID NO: 5215 - DNA, 33 bp, homo sapiens
gggtacaggagcagatraaaacaaaacaagtga

SEQ ID NO: 5216 - DNA, 33 bp, homo sapiens
actgggctttactacaratcatctctcagagat

SEQ ID NO: 5217 - DNA, 33 bp, homo sapiens
tgtatgatggattcagraacagggtagctagaa

SEQ ID NO: 5218 - DNA, 33 bp, homo sapiens
gttcctgtgggctatcrgaatgggtatgcggtc

SEQ ID NO: 5219 - DNA, 33 bp, homo sapiens
ctaaggcatatgtgggmaatgggccatagggaa

SEQ ID NO: 5220 - DNA, 33 bp, homo sapiens
acataaccagaggaccraacagtctttctgtcc

SEQ ID NO: 5221 - DNA, 33 bp, homo sapiens
ttcaccaacaatgcaargagaggaaagaaggca

SEQ ID NO: 5222 - DNA, 33 bp, homo sapiens
cagtaactcgaaactayaggagtttattagata

SEQ ID NO: 5223 - DNA, 33 bp, homo sapiens
cctaaaaggcttttaaraggcacaacacagtta

SEQ ID NO: 5224 - DNA, 33 bp, homo sapiens
gaaacgcaattgtaagyagctgggaatttcaat

SEQ ID NO: 5225 - DNA, 33 bp, homo sapiens
tgcagactggttgtagycctttcatggaaacta

SEQ ID NO: 5226 - DNA, 33 bp, homo sapiens
gcaggttaaagttgcaygagtagatggtagaat

SEQ ID NO: 5227 - DNA, 33 bp, homo sapiens
atagaagcctggcggayatctggacagaactat

SEQ ID NO: 5228 - DNA, 33 bp, homo sapiens
cttgtccccattttaaycttttgatgctggaag

SEQ ID NO: 5229 - DNA, 33 bp, homo sapiens
atcaggaagtatgctcwaacagtagttcagaac

SEQ ID NO: 5230 - DNA, 33 bp, homo sapiens
acagaactttgtcccaygtgccaactctggact

SEQ ID NO: 5231 - DNA, 33 bp, homo sapiens
tgagtagatgggtcaaygtcagagggtagaggg

SEQ ID NO: 5232 - DNA, 33 bp, homo sapiens
aaatatcctgtgatgakctcctggagtctaaat

SEQ ID NO: 5233 - DNA, 33 bp, homo sapiens
ctgattggatcaaggcmaaaagcaccagtgtat

SEQ ID NO: 5234 - DNA, 33 bp, homo sapiens
gggcatttctatgtgcrgatgaaataggtggca

SEQ ID NO: 5235 - DNA, 33 bp, homo sapiens
aacatttacgtcaaggrcatattgtaggaacca

SEQ ID NO: 5236 - DNA, 33 bp, homo sapiens
caggcagattcatttayacaggtaagaaccaca

SEQ ID NO: 5237 - DNA, 33 bp, homo sapiens
catgcttgttctgagakcctgagctgctgcatt

SEQ ID NO: 5238 - DNA, 33 bp, homo sapiens
acagcaaaataaagtaytaccctcacatcaaca

SEQ ID NO: 5239 - DNA, 33 bp, homo sapiens
agacagaaactgcagakgtcaggcatgtatttt

SEQ ID NO: 5240 - DNA, 33 bp, homo sapiens
cggttaaaaatcagacygaagcatggttttaac

SEQ ID NO: 5241 - DNA, 33 bp, homo sapiens
actgagagaagtcccasatgaatccctctgctc

SEQ ID NO: 5242 - DNA, 33 bp, homo sapiens
gataggaaagtaatggycaacaactcagtaatt

SEQ ID NO: 5243 - DNA, 33 bp, homo sapiens
gagggtaagaaggtcastaatgttgcataatta

SEQ ID NO: 5244 - DNA, 33 bp, homo sapiens
cacagttatgcctgtcrttgaaccaggagtcaa

SEQ ID NO: 5245 - DNA, 33 bp, homo sapiens
ctcagtcatcagacccraagtgtttaatatgag

SEQ ID NO: 5246 - DNA, 33 bp, homo sapiens
agggagtgattcagtasatctttctttgatctg

SEQ ID NO: 5247 - DNA, 33 bp, homo sapiens
tttccttacctgcttayggatagacttttaggt

SEQ ID NO: 5248 - DNA, 33 bp, homo sapiens
caatttcacggatagamgattcattcatactgt

SEQ ID NO: 5249 - DNA, 33 bp, homo sapiens
ctgagtcaactgtgaastggtgaaggattccca

SEQ ID NO: 5250 - DNA, 33 bp, homo sapiens
gctctaattggtaaackgtgcatcctgatgtga

SEQ ID NO: 5251 - DNA, 33 bp, homo sapiens
ttctgggaaacttcacygctttccaatagctaa

SEQ ID NO: 5252 - DNA, 33 bp, homo sapiens
gaggtggtcaccaggartaagttgtgtaaggca

SEQ ID NO: 5253 - DNA, 33 bp, homo sapiens
aatgtaccaactgatayggttttcatttctgtc

SEQ ID NO: 5254 - DNA, 33 bp, homo sapiens
cctcagcacaccctaaytggagagatacacaaa

SEQ ID NO: 5255 - DNA, 33 bp, homo sapiens
cagttttacacacttcragcaagataaacagta

SEQ ID NO: 5256 - DNA, 33 bp, homo sapiens
catcttatccaagtccracagaatccatgttta

SEQ ID NO: 5257 - DNA, 33 bp, homo sapiens
taaaaatatgtaacaaragcattcatttcaaaa

SEQ ID NO: 5258 - DNA, 33 bp, homo sapiens
gacttaacaaattgacygaattctgaatgcatc

SEQ ID NO: 5259 - DNA, 33 bp, homo sapiens
ttattgagagatacaargtttctgtgagagatg

SEQ ID NO: 5260 - DNA, 33 bp, homo sapiens
ggacagttggtatcagmaaattctaaatgacag

SEQ ID NO: 5261 - DNA, 33 bp, homo sapiens
cttaggcattttcctcwcggtgaacaattatta

SEQ ID NO: 5262 - DNA, 33 bp, homo sapiens
gaactgtgctacaaagrcattttctgttgctgc

SEQ ID NO: 5263 - DNA, 33 bp, homo sapiens
caactcacactagggamtcagtatttgaaaagt

SEQ ID NO: 5264 - DNA, 33 bp, homo sapiens
gttgtctgttagtagcrcttggaaaattttgta

SEQ ID NO: 5265 - DNA, 33 bp, homo sapiens
gatcacttgtactgtayaataaaggatctgttt

SEQ ID NO: 5266 - DNA, 33 bp, homo sapiens
caaatgctgtgctacakgattgcatttatacaa

SEQ ID NO: 5267 - DNA, 33 bp, homo sapiens
tcactggtactcttccrggaaccattctagctc

SEQ ID NO: 5268 - DNA, 33 bp, homo sapiens
gcagatgatttagtaayggtgataacagaaata

SEQ ID NO: 5269 - DNA, 33 bp, homo sapiens
tttgcactctgggagaragattggactcaactc

SEQ ID NO: 5270 - DNA, 33 bp, homo sapiens
aaagtcaaatgtacatkaaattttcagccctca

SEQ ID NO: 5271 - DNA, 33 bp, homo sapiens
actccagcctgtgtgamagagtctatctcaaaa

SEQ ID NO: 5272 - DNA, 33 bp, homo sapiens
attatgcgcaaaatttraaacaatatgatttct

SEQ ID NO: 5273 - DNA, 33 bp, homo sapiens
ccaccttttcctcaaaygttgtaataaaagtcc

SEQ ID NO: 5274 - DNA, 33 bp, homo sapiens
atgtatgttgttttcaygtttcagctcatgtat

SEQ ID NO: 5275 - DNA, 33 bp, homo sapiens
tccccagctttatcaaygggtccaaagttcctt

SEQ ID NO: 5276 - DNA, 33 bp, homo sapiens
tgggcttttgtgccacygggattaattccatga

SEQ ID NO: 5277 - DNA, 33 bp, homo sapiens
cagaaattcaggaaggkcctctataagatatga

SEQ ID NO: 5278 - DNA, 33 bp, homo sapiens
aatatagtatatcctayggaccagacacaatgc

SEQ ID NO: 5279 - DNA, 33 bp, homo sapiens
caaagcgtcctagaacyggttagaaaatatttt

SEQ ID NO: 5280 - DNA, 33 bp, homo sapiens
ttctcaaagaacaggcwatcaatgacaagagtc

SEQ ID NO: 5281 - DNA, 33 bp, homo sapiens
gtgttacacataggccyaactggttgtcatttt

SEQ ID NO: 5282 - DNA, 33 bp, homo sapiens
ctatttttctattcacrctaatctctctagcag

SEQ ID NO: 5283 - DNA, 33 bp, homo sapiens
tcaatccacagcttggycacatatttattcctc

SEQ ID NO: 5284 - DNA, 33 bp, homo sapiens
cttacatgaagtgtccrgcatatttccagaata

SEQ ID NO: 5285 - DNA, 33 bp, homo sapiens
ggattacagcttagtayaccaagacctagagaa

SEQ ID NO: 5286 - DNA, 33 bp, homo sapiens
tagaccatacagtttcrccaaggcagggacttc

SEQ ID NO: 5287 - DNA, 33 bp, homo sapiens
cacactatttaaggcargtactattattatcat

SEQ ID NO: 5288 - DNA, 33 bp, homo sapiens
aataactgtcttcatcraaaacttagttcccca

SEQ ID NO: 5289 - DNA, 33 bp, homo sapiens
gagtcgtctggtaaaamgagttaattgccttgc

SEQ ID NO: 5290 - DNA, 33 bp, homo sapiens
accctggcaactttgamggaaagcgtgctcgga

SEQ ID NO: 5291 - DNA, 33 bp, homo sapiens
gctcatccagtgaagasagaaaggctgggctga

SEQ ID NO: 5292 - DNA, 33 bp, homo sapiens
ttactgtctctctacaytcaccaaattataagc

SEQ ID NO: 5293 - DNA, 33 bp, homo sapiens
tgtggtgtctgccaaartgcctttcgacagcac

SEQ ID NO: 5294 - DNA, 33 bp, homo sapiens
aaataattattagcaargtagttgaacagggac

SEQ ID NO: 5295 - DNA, 33 bp, homo sapiens
tggtgtaacgcagtaamattttgttttttggtg

SEQ ID NO: 5296 - DNA, 33 bp, homo sapiens
acacctgtcttgctcargattctcaggattttg

SEQ ID NO: 5297 - DNA, 33 bp, homo sapiens
tgtccctggaatacaaratcatccctgattgag

SEQ ID NO: 5298 - DNA, 33 bp, homo sapiens
aagtatttatggggaarccttgtcgagatcagc

SEQ ID NO: 5299 - DNA, 33 bp, homo sapiens
atggatttagcttggcycatcaatattttaaag

SEQ ID NO: 5300 - DNA, 33 bp, homo sapiens
acctgacttgaggatgsactgagggaatccaag

SEQ ID NO: 5301 - DNA, 33 bp, homo sapiens
ttatttaagcatttaawaatcatgacatgtttc

SEQ ID NO: 5302 - DNA, 33 bp, homo sapiens
atggactaatacatacrctaagtcaaacaagac

SEQ ID NO: 5303 - DNA, 33 bp, homo sapiens
gatctaatgaagttaasagcacctactcggtgc

SEQ ID NO: 5304 - DNA, 33 bp, homo sapiens
gccaagtgggtgtgaastgttccattgactcag

SEQ ID NO: 5305 - DNA, 33 bp, homo sapiens
actatccccagatcacrcagctaataaaggcag

SEQ ID NO: 5306 - DNA, 33 bp, homo sapiens
cctttcacttctgggaycaatatgcccatccta

SEQ ID NO: 5307 - DNA, 33 bp, homo sapiens
gtgcatctcagttacaygccaagatgccgttgg

SEQ ID NO: 5308 - DNA, 33 bp, homo sapiens
ttttagctcaaaagacrcttagcaatttgcagt

SEQ ID NO: 5309 - DNA, 33 bp, homo sapiens
catgagcagatcaatcmagacagactcccagtg

SEQ ID NO: 5310 - DNA, 33 bp, homo sapiens
ccaaagcacatgcctgratcgagcccatgcccc

SEQ ID NO: 5311 - DNA, 33 bp, homo sapiens
tttgaggcttttgttaygagaagctggacaagc

SEQ ID NO: 5312 - DNA, 33 bp, homo sapiens
ccctcaattacagcagsaaaaacgtggggacct

SEQ ID NO: 5313 - DNA, 33 bp, homo sapiens
atcccatcttacccacratagagcagctgtaga

SEQ ID NO: 5314 - DNA, 33 bp, homo sapiens
ttgtctggtagattaaytcctctttatccttca

SEQ ID NO: 5315 - DNA, 33 bp, homo sapiens
gatggtgagacacacaraggaagagacccgagc

SEQ ID NO: 5316 - DNA, 33 bp, homo sapiens
tgattgatgcggtgtaygccattgcccacgccc

SEQ ID NO: 5317 - DNA, 33 bp, homo sapiens
ctgcagagagagcgaaygtcctccggagcagag

SEQ ID NO: 5318 - DNA, 33 bp, homo sapiens
acccagctcgaccccgsaatcacacagccagta

SEQ ID NO: 5319 - DNA, 33 bp, homo sapiens
aaaactcctgaataccrccacccacagattact

SEQ ID NO: 5320 - DNA, 33 bp, homo sapiens
gggatttctgatgttasggtcctaaggcttttg

SEQ ID NO: 5321 - DNA, 33 bp, homo sapiens
gattctaagtaactgcraccctgccgtagacgc

SEQ ID NO: 5322 - DNA, 33 bp, homo sapiens
ctcatcttcagcaaaargaagcccaatccatgt

SEQ ID NO: 5323 - DNA, 33 bp, homo sapiens
tctggcccagtaacgasgatcacatggctccac

SEQ ID NO: 5324 - DNA, 33 bp, homo sapiens
tataaggcatcagagcwattcttggtctgctgc

SEQ ID NO: 5325 - DNA, 33 bp, homo sapiens
taaaaaagttgaatggmaatgttagaaatgaaa

SEQ ID NO: 5326 - DNA, 33 bp, homo sapiens
tgccactcttctcaagmaaggtatcctgggatc

SEQ ID NO: 5327 - DNA, 33 bp, homo sapiens
tctaactaaagtcagarggttatacaaatttct

SEQ ID NO: 5328 - DNA, 33 bp, homo sapiens
acaaagcaagaaagaasataagatttcacattc

SEQ ID NO: 5329 - DNA, 33 bp, homo sapiens
tgtatagttgctttgaygcctaagccaaaaata

SEQ ID NO: 5330 - DNA, 33 bp, homo sapiens
ctctttgtggatcttaraagaaccatatttgct

SEQ ID NO: 5331 - DNA, 33 bp, homo sapiens
agggggttttattaccragaggaagacaaaagt

SEQ ID NO: 5332 - DNA, 33 bp, homo sapiens
gcagaccccttcctaarcatcattctgcctgtg

SEQ ID NO: 5333 - DNA, 33 bp, homo sapiens
cttatgaaagaccagckctactatacttccact

SEQ ID NO: 5334 - DNA, 33 bp, homo sapiens
aaaggaatattctaccrgcagtttataataggc

SEQ ID NO: 5335 - DNA, 33 bp, homo sapiens
tcagtaggcacaaggcragggtcacatgatcac

SEQ ID NO: 5336 - DNA, 33 bp, homo sapiens
aataaagagacataaartgagtgtttaaaggct

SEQ ID NO: 5337 - DNA, 33 bp, homo sapiens
tatagtaaatagtggascagccaacgattaggt

SEQ ID NO: 5338 - DNA, 33 bp, homo sapiens
gacagttaccgccaaakggataagccggcaacc

SEQ ID NO: 5339 - DNA, 33 bp, homo sapiens
gattcagtggtcatgamgtaatcgtgcccacat

SEQ ID NO: 5340 - DNA, 33 bp, homo sapiens
ttaggaaacagtccccratttctgactcatcct

SEQ ID NO: 5341 - DNA, 33 bp, homo sapiens
taaaagattcattgacyagagctaatgagcaat

SEQ ID NO: 5342 - DNA, 33 bp, homo sapiens
aataaatgcttaaaaamccagcatacacaaggt

SEQ ID NO: 5343 - DNA, 33 bp, homo sapiens
aacgccatgaaaggaaragacgccaggatggac

SEQ ID NO: 5344 - DNA, 33 bp, homo sapiens
ctcacagagaaggaagyctacgtggtcacaaga

SEQ ID NO: 5345 - DNA, 33 bp, homo sapiens
ttaacttcggaatagcrcaattagattgcattg

SEQ ID NO: 5346 - DNA, 33 bp, homo sapiens
tattaattctttttagrccttgatattttctct

SEQ ID NO: 5347 - DNA, 33 bp, homo sapiens
tgctctgagaggctccrgcaacatttataccca

SEQ ID NO: 5348 - DNA, 33 bp, homo sapiens
cgtggaagtgtataaaytatctggaattatctt

SEQ ID NO: 5349 - DNA, 33 bp, homo sapiens
aacggaatgggaaataygaggcttcaggaagga

SEQ ID NO: 5350 - DNA, 33 bp, homo sapiens
aagtgcagctgtcatcyatttgtagcttgcgcc

SEQ ID NO: 5351 - DNA, 33 bp, homo sapiens
acactgcccccacatcrcagtgaaaaatgccag

SEQ ID NO: 5352 - DNA, 33 bp, homo sapiens
ggggaaactgaggcccraaggaataaggtgact

SEQ ID NO: 5353 - DNA, 33 bp, homo sapiens
gaacaaaaaaagggaarctccgtctgtgttaga

SEQ ID NO: 5354 - DNA, 33 bp, homo sapiens
ggcttagctacctgtcrcatcaaaggattcagt

SEQ ID NO: 5355 - DNA, 33 bp, homo sapiens
tgttccttcagtcctaygcttcagccctgggtg

SEQ ID NO: 5356 - DNA, 33 bp, homo sapiens
atgcacatcctgtcaargtcctgtagtggttgt

SEQ ID NO: 5357 - DNA, 33 bp, homo sapiens
gaagctaccgaaaaaayggacctcctcttgact

SEQ ID NO: 5358 - DNA, 33 bp, homo sapiens
agattgaacaaaattaygtgtacagagtttggc

SEQ ID NO: 5359 - DNA, 33 bp, homo sapiens
tggggagagagatgccragaagaagcctggagc

SEQ ID NO: 5360 - DNA, 33 bp, homo sapiens
catgggccttggaaacygagtgatcatggtgac

SEQ ID NO: 5361 - DNA, 33 bp, homo sapiens
ttgtcgttgttcatcartgagaaggtttgttta

SEQ ID NO: 5362 - DNA, 33 bp, homo sapiens
taaatgtatttcacaawtagggcacctgttcct

SEQ ID NO: 5363 - DNA, 33 bp, homo sapiens
gcctaagattccagacrggtatcactctgtgga

SEQ ID NO: 5364 - DNA, 33 bp, homo sapiens
atctatcttctgctgastaatgcttgaaatctc

SEQ ID NO: 5365 - DNA, 33 bp, homo sapiens
gtctcaacaaagggacyggattagcccaactca

SEQ ID NO: 5366 - DNA, 33 bp, homo sapiens
cagtcttgtcttgatcsagaagtggtgcccctt

SEQ ID NO: 5367 - DNA, 33 bp, homo sapiens
cttcctgtgaaagataygtgacttgattttaac

SEQ ID NO: 5368 - DNA, 33 bp, homo sapiens
tctctgggagagcccakaacccttcatcacatt

SEQ ID NO: 5369 - DNA, 33 bp, homo sapiens
ccatgtgctgcctttawcagaaccttctgtctt

SEQ ID NO: 5370 - DNA, 33 bp, homo sapiens
cagcctaaactaattaygagtggggaatttgta

SEQ ID NO: 5371 - DNA, 33 bp, homo sapiens
aggattaccttctccarcaactaggaacaagtt

SEQ ID NO: 5372 - DNA, 33 bp, homo sapiens
tttgcaaccacttcctsaaggagattctgtaat

SEQ ID NO: 5373 - DNA, 33 bp, homo sapiens
ccaggatttctatgccrcaagctcaaacacctt

SEQ ID NO: 5374 - DNA, 33 bp, homo sapiens
tgtattggagagcacaycgttggatgcttccat

SEQ ID NO: 5375 - DNA, 33 bp, homo sapiens
gtttcaataacttaccrcaggcccaaaatggat

SEQ ID NO: 5376 - DNA, 33 bp, homo sapiens
tggtgacgatcaataaygtttattcaatactca

SEQ ID NO: 5377 - DNA, 33 bp, homo sapiens
atttctcctaatgataygattttctgtgcatat

SEQ ID NO: 5378 - DNA, 33 bp, homo sapiens
tgcacagactttttaakaccacacaaattttgt

SEQ ID NO: 5379 - DNA, 33 bp, homo sapiens
ccttctcaaaacttacyacatacattttctctt

SEQ ID NO: 5380 - DNA, 33 bp, homo sapiens
attcctgttgagtcaarccaccatagaatatcc

SEQ ID NO: 5381 - DNA, 33 bp, homo sapiens
caaaattggacatcatkaaggtacaaataccta

SEQ ID NO: 5382 - DNA, 33 bp, homo sapiens
caaagctgaattccacygcatagcataagggtg

SEQ ID NO: 5383 - DNA, 33 bp, homo sapiens
ggccagtcaaggatacygacaagcacaccaaag

SEQ ID NO: 5384 - DNA, 33 bp, homo sapiens
tatatgcgatctctacygagaagcaagcacaaa

SEQ ID NO: 5385 - DNA, 33 bp, homo sapiens
ctctttatggttgtcayaataaccttgcaagtt

SEQ ID NO: 5386 - DNA, 33 bp, homo sapiens
tctgcgtatatcgccaytggatagttgagatcg

SEQ ID NO: 5387 - DNA, 33 bp, homo sapiens
tatcctggcttagactyagaccactggttacaa

SEQ ID NO: 5388 - DNA, 33 bp, homo sapiens
ggaacccagtggtttgsatgggtcaattcactt

SEQ ID NO: 5389 - DNA, 33 bp, homo sapiens
tgcacaataaacttaaygtgacagtagatgaca

SEQ ID NO: 5390 - DNA, 33 bp, homo sapiens
tgacaggctctgatggycacagtacctgaatcc

SEQ ID NO: 5391 - DNA, 33 bp, homo sapiens
atcaacaggatcacatyaaacaccctcctttaa

SEQ ID NO: 5392 - DNA, 33 bp, homo sapiens
atgaggtctgggcaccragtttatttgctctaa

SEQ ID NO: 5393 - DNA, 33 bp, homo sapiens
tgttttgaactctacayaaatggaatcacacag

SEQ ID NO: 5394 - DNA, 33 bp, homo sapiens
ttctgctcccaggaaarttattacttatatgtt

SEQ ID NO: 5395 - DNA, 33 bp, homo sapiens
ttatttatgtcaaatgmagtaaaatacagccat

SEQ ID NO: 5396 - DNA, 33 bp, homo sapiens
gggaaactgctaatacyggactgtttataaaaa

SEQ ID NO: 5397 - DNA, 33 bp, homo sapiens
aacttgctttctttctyacctggtaattgagtt

SEQ ID NO: 5398 - DNA, 33 bp, homo sapiens
taatgtgccagtttacyctcatggcgacagccc

SEQ ID NO: 5399 - DNA, 33 bp, homo sapiens
aattaccagatcttcaragtggatactggatgg

SEQ ID NO: 5400 - DNA, 33 bp, homo sapiens
accagcaatgcataaayggaccttaataggaat

SEQ ID NO: 5401 - DNA, 33 bp, homo sapiens
atattttcacaaaacargtcactagataccgct

SEQ ID NO: 5402 - DNA, 33 bp, homo sapiens
cctatgcagagctttcrcagcaatcttgcgaat

SEQ ID NO: 5403 - DNA, 33 bp, homo sapiens
ggctgcgtgttctccaratggagtcagtaacac

SEQ ID NO: 5404 - DNA, 33 bp, homo sapiens
attacactggtaactcygaaacctggtacagat

SEQ ID NO: 5405 - DNA, 33 bp, homo sapiens
ctgtaatggacttatawaatcgatgtgggagca

SEQ ID NO: 5406 - DNA, 33 bp, homo sapiens
gcgcagccggacagaakgagaagtcagaggagt

SEQ ID NO: 5407 - DNA, 33 bp, homo sapiens
gggcatccggttgagcrgcaccagatgtgcttt

SEQ ID NO: 5408 - DNA, 33 bp, homo sapiens
tctgcttcgctgtgacracaaatgaaacaacat

SEQ ID NO: 5409 - DNA, 33 bp, homo sapiens
aatacttccatcaagartcataaaatgtcactt

SEQ ID NO: 5410 - DNA, 33 bp, homo sapiens
ccctaagaaatttgaasggtacgcaaaatccaa

SEQ ID NO: 5411 - DNA, 33 bp, homo sapiens
tccaaatactgtatgaytcaaaggctatctcga

SEQ ID NO: 5412 - DNA, 33 bp, homo sapiens
gacagactcttggattyaggcttaggacaagca

SEQ ID NO: 5413 - DNA, 33 bp, homo sapiens
aatactaaaatactgasgaagtagcgcaaagtc

SEQ ID NO: 5414 - DNA, 33 bp, homo sapiens
cagcaaccaatcagaamgcagtgcctaggcgag

SEQ ID NO: 5415 - DNA, 33 bp, homo sapiens
tcccaggtctttcatcyagaatgttgaggctat

SEQ ID NO: 5416 - DNA, 33 bp, homo sapiens
cagcctgtgcagcccayacaatcatccttaagc

SEQ ID NO: 5417 - DNA, 33 bp, homo sapiens
taaatttctcctttgaycacttaaatgtaaata

SEQ ID NO: 5418 - DNA, 33 bp, homo sapiens
attgtttactgttcagsagttgtgtaggggtgg

SEQ ID NO: 5419 - DNA, 33 bp, homo sapiens
actaatacggtgaccaygtttatgtacccattg

SEQ ID NO: 5420 - DNA, 33 bp, homo sapiens
tgcctggagacgaagaygttaggaaatagtctt

SEQ ID NO: 5421 - DNA, 33 bp, homo sapiens
ttacctgattgaaatcracggatgagtttatta

SEQ ID NO: 5422 - DNA, 33 bp, homo sapiens
aggtacaatgcaaacaytgaagtacatattcca

SEQ ID NO: 5423 - DNA, 33 bp, homo sapiens
ttgtaagcctctgaacracatcccaagaaacag

SEQ ID NO: 5424 - DNA, 33 bp, homo sapiens
ctactttttgtaagtarattgcagtttaagtct

SEQ ID NO: 5425 - DNA, 33 bp, homo sapiens
acctatccattcttaartgaactaccttctatt

SEQ ID NO: 5426 - DNA, 33 bp, homo sapiens
tgaggtttagagtagaraatctaggtgtagagc

SEQ ID NO: 5427 - DNA, 33 bp, homo sapiens
tcgggaggctgaacacyggccctcagaccagaa

SEQ ID NO: 5428 - DNA, 33 bp, homo sapiens
tgctgcctaagttagaygataaggaatatgtgt

SEQ ID NO: 5429 - DNA, 33 bp, homo sapiens
cagtttgccaaatgagycctttccaagtgtttt

SEQ ID NO: 5430 - DNA, 33 bp, homo sapiens
gtccaaaaagttaagartctaacagctagaatt

SEQ ID NO: 5431 - DNA, 33 bp, homo sapiens
ggtaggcaatgaagatwagctcattagaccaga

SEQ ID NO: 5432 - DNA, 33 bp, homo sapiens
aataaaaattacagtasaaggatcatggcaatg

SEQ ID NO: 5433 - DNA, 33 bp, homo sapiens
tctacagcaaaacaaaygtagcagcttagagaa

SEQ ID NO: 5434 - DNA, 33 bp, homo sapiens
tgtgagggtgaagaaayaaactggtaggtaggg

SEQ ID NO: 5435 - DNA, 33 bp, homo sapiens
tcactctggcagctgamctaagaataggctata

SEQ ID NO: 5436 - DNA, 33 bp, homo sapiens
atttactgagtctaccrggcctcatacacttgc

SEQ ID NO: 5437 - DNA, 33 bp, homo sapiens
agcttttggactcaccraaccaagaaaataata

SEQ ID NO: 5438 - DNA, 33 bp, homo sapiens
acgttgaagtataacartaatccagctacaatg

SEQ ID NO: 5439 - DNA, 33 bp, homo sapiens
ttaaacaataatgggawctaaactattggaaga

SEQ ID NO: 5440 - DNA, 33 bp, homo sapiens
agaacactgtaaagtcmagtttgtctcctccgg

SEQ ID NO: 5441 - DNA, 33 bp, homo sapiens
gcgtgctgtttggtaaytcctgcagtttatgtg

SEQ ID NO: 5442 - DNA, 33 bp, homo sapiens
agtgctaaaatagaagygtaagggagacatcac

SEQ ID NO: 5443 - DNA, 33 bp, homo sapiens
ttatgtttgtaactcarggaataagcattagct

SEQ ID NO: 5444 - DNA, 33 bp, homo sapiens
ggtggtaaaaggtcagycctgtgttgtaatcca

SEQ ID NO: 5445 - DNA, 33 bp, homo sapiens
cacaaaacaaaacgaargaataccagataacgt

SEQ ID NO: 5446 - DNA, 33 bp, homo sapiens
tggtttacaagtttaaygcagaacaggagctcc

SEQ ID NO: 5447 - DNA, 33 bp, homo sapiens
cattttaggcataaacygttctgctagaatcca

SEQ ID NO: 5448 - DNA, 33 bp, homo sapiens
gtttcttgactaaataracgttcgttgaatgaa

SEQ ID NO: 5449 - DNA, 33 bp, homo sapiens
ttcctcacagttgtacwcagagagagagttgta

SEQ ID NO: 5450 - DNA, 33 bp, homo sapiens
cttacagggctgaggarattaaaattaaatttc

SEQ ID NO: 5451 - DNA, 33 bp, homo sapiens
aaatcttcacaatctcracttccaacaaaaggc

SEQ ID NO: 5452 - DNA, 33 bp, homo sapiens
actaattagctaaaaartaatactcacaaataa

SEQ ID NO: 5453 - DNA, 33 bp, homo sapiens
tctactaagtgtactcratatagaattggctag

SEQ ID NO: 5454 - DNA, 33 bp, homo sapiens
aacagctccttgcgggyagtgaccttgtctgtc

SEQ ID NO: 5455 - DNA, 33 bp, homo sapiens
tctgatatcctcaagawtaaagaacaactctgt

SEQ ID NO: 5456 - DNA, 33 bp, homo sapiens
tttattttattttttarcatggcagctttcaga

SEQ ID NO: 5457 - DNA, 33 bp, homo sapiens
aaacaaaagatttccartgatgcggtttggctt

SEQ ID NO: 5458 - DNA, 33 bp, homo sapiens
aggccttctgataacaytaattaccagcagagt

SEQ ID NO: 5459 - DNA, 33 bp, homo sapiens
agatagctcatcatgcygcaaaaagttaggcca

SEQ ID NO: 5460 - DNA, 33 bp, homo sapiens
atccaaagagattttawacacgggaacaccacc

SEQ ID NO: 5461 - DNA, 33 bp, homo sapiens
ctcaaagaaatcattarggttgtgggacctcaa

SEQ ID NO: 5462 - DNA, 33 bp, homo sapiens
tgggacttcagagcacractgctgtgatgatga

SEQ ID NO: 5463 - DNA, 33 bp, homo sapiens
gcagttgcagtagataycatttggcctgcaagc

SEQ ID NO: 5464 - DNA, 33 bp, homo sapiens
gtaaaggttgttaaacrgcaggaatgatttatt

SEQ ID NO: 5465 - DNA, 33 bp, homo sapiens
gagagttttgtgtaaayactttgagggatgaac

SEQ ID NO: 5466 - DNA, 33 bp, homo sapiens
ctttttttgtagcaatsaaccatctccgctttc

SEQ ID NO: 5467 - DNA, 33 bp, homo sapiens
atgtcttctactcacayccatccgtttggcaag

SEQ ID NO: 5468 - DNA, 33 bp, homo sapiens
catagagaatccactayccaaaggagatcccaa

SEQ ID NO: 5469 - DNA, 33 bp, homo sapiens
aagaaatgtgttctgascaatgtgtccttagtg

SEQ ID NO: 5470 - DNA, 33 bp, homo sapiens
tctgggggattttatawcaagattctaagaagg

SEQ ID NO: 5471 - DNA, 33 bp, homo sapiens
gagtaagtgatcattaycaggaacctaaccacc

SEQ ID NO: 5472 - DNA, 33 bp, homo sapiens
gttacttaaagtactaygttgttggtgtcctgt

SEQ ID NO: 5473 - DNA, 33 bp, homo sapiens
cggaaggcaaaatttcraactagtaagagtaat

SEQ ID NO: 5474 - DNA, 33 bp, homo sapiens
tgcccaagcctttcgaygactcctgattataaa

SEQ ID NO: 5475 - DNA, 33 bp, homo sapiens
gaccttgaccaccagaktaagaaaagtaagaat

SEQ ID NO: 5476 - DNA, 33 bp, homo sapiens
aataatccacacctagmagaggaaaagctagtg

SEQ ID NO: 5477 - DNA, 33 bp, homo sapiens
atcagcacagtattcaratgttagtctcaaaat

SEQ ID NO: 5478 - DNA, 33 bp, homo sapiens
atttctgtgcattaacrgcccaagaacccagag

SEQ ID NO: 5479 - DNA, 33 bp, homo sapiens
gtatttttctcttctakaatgtctagttggttc

SEQ ID NO: 5480 - DNA, 33 bp, homo sapiens
ttgacctgatgcctacwatttacattatgctga

SEQ ID NO: 5481 - DNA, 33 bp, homo sapiens
gcagtcctgacataaawgttggttatgtgcttt

SEQ ID NO: 5482 - DNA, 33 bp, homo sapiens
atatgcaaaaaggtcasaacctccatgttagtt

SEQ ID NO: 5483 - DNA, 33 bp, homo sapiens
tggtcacacgccccaaragtttattaagctcct

SEQ ID NO: 5484 - DNA, 33 bp, homo sapiens
tgaacatcgggaaccaygcaaaatccctttcct

SEQ ID NO: 5485 - DNA, 33 bp, homo sapiens
acctttgccttgcaaaytccaaaatgttacata

SEQ ID NO: 5486 - DNA, 33 bp, homo sapiens
gtgagtcaggaaactaraatttgaacaggacaa

SEQ ID NO: 5487 - DNA, 33 bp, homo sapiens
gggacctactggttcayccttcctggtccttga

SEQ ID NO: 5488 - DNA, 33 bp, homo sapiens
aaaaagccataaatgasagaatttagcactaga

SEQ ID NO: 5489 - DNA, 33 bp, homo sapiens
agtgttcctctttagargctagaagaaataatt

SEQ ID NO: 5490 - DNA, 33 bp, homo sapiens
atcaccagaatggatartaacccagacatcgat

SEQ ID NO: 5491 - DNA, 33 bp, homo sapiens
tggatgaatggataaargactgtgcatatatac

SEQ ID NO: 5492 - DNA, 33 bp, homo sapiens
tatatattcccagaaakaaaactcaagggtcag

SEQ ID NO: 5493 - DNA, 33 bp, homo sapiens
ctctttcgcataatcamctctatcattcttatc

SEQ ID NO: 5494 - DNA, 33 bp, homo sapiens
gtgtctctgtgagttamaacttccttcatactc

SEQ ID NO: 5495 - DNA, 33 bp, homo sapiens
tgtcattatccttactyagctcccttaaagcag

SEQ ID NO: 5496 - DNA, 33 bp, homo sapiens
gtagtactgtgactttyaaaatgatgtcatcag

SEQ ID NO: 5497 - DNA, 33 bp, homo sapiens
aaaacaacacaaatacyagcaaaactggagcag

SEQ ID NO: 5498 - DNA, 33 bp, homo sapiens
gttgcaggtttccccaratagagaacatcaata

SEQ ID NO: 5499 - DNA, 33 bp, homo sapiens
ttcaaatgggaattackgcacatcctcaccatc

SEQ ID NO: 5500 - DNA, 33 bp, homo sapiens
gaccttacttaagtacygattccccctttataa

SEQ ID NO: 5501 - DNA, 33 bp, homo sapiens
gctgagtccacaggaaragtatgcttgttcata

SEQ ID NO: 5502 - DNA, 33 bp, homo sapiens
aaacggctgcaaggctragagacagagagagag

SEQ ID NO: 5503 - DNA, 33 bp, homo sapiens
tagaatccaacctgaawgagaggccagggcctg

SEQ ID NO: 5504 - DNA, 33 bp, homo sapiens
acatatgtttagatccrcaaatacctaccattg

SEQ ID NO: 5505 - DNA, 33 bp, homo sapiens
tgaggatcagtatagtyactagatgaagaggac

SEQ ID NO: 5506 - DNA, 33 bp, homo sapiens
tgagctacaagagatcyagacaagtcggaggaa

SEQ ID NO: 5507 - DNA, 33 bp, homo sapiens
gtccctaaggtacaaayccaagagaaggaagtg

SEQ ID NO: 5508 - DNA, 33 bp, homo sapiens
tcaaaagagaagcaaartgagggagcacgcagg

SEQ ID NO: 5509 - DNA, 33 bp, homo sapiens
tctctggaattaatcaytgaatttgcaaaatag

SEQ ID NO: 5510 - DNA, 33 bp, homo sapiens
tttaaagaagtccaaaygtctggccaggcgcat

SEQ ID NO: 5511 - DNA, 33 bp, homo sapiens
attgacaggtgaagaartctgggcatggagttt

SEQ ID NO: 5512 - DNA, 33 bp, homo sapiens
tggaagagaccacaaascgcaggcaattggcag

SEQ ID NO: 5513 - DNA, 33 bp, homo sapiens
tcatcccagtttcacaraggaggacatcgaggc

SEQ ID NO: 5514 - DNA, 33 bp, homo sapiens
catcggttaaagatcaygccaacaggaaccagc

SEQ ID NO: 5515 - DNA, 33 bp, homo sapiens
aggaagattagcccaartaggaaggctgcaatg

SEQ ID NO: 5516 - DNA, 33 bp, homo sapiens
cccagctgtgtggaccyaagatttctcgctctc

SEQ ID NO: 5517 - DNA, 33 bp, homo sapiens
ttgaacttctgactccrctctacttcctccttc

SEQ ID NO: 5518 - DNA, 33 bp, homo sapiens
cctcccaacattgcaarctcttcctcgctttct

SEQ ID NO: 5519 - DNA, 33 bp, homo sapiens
actccagtgccaatcaytgagattcattagctc

SEQ ID NO: 5520 - DNA, 33 bp, homo sapiens
cttggagggaggaagasgttacgaggcacacaa

SEQ ID NO: 5521 - DNA, 33 bp, homo sapiens
gtgtaaaagacaataaygacagatgtgaaagag

SEQ ID NO: 5522 - DNA, 33 bp, homo sapiens
gtgagcaagggggcccraatcgaccataaaggg

SEQ ID NO: 5523 - DNA, 33 bp, homo sapiens
tgatagtttcataggcraacatgtcatgacttt

SEQ ID NO: 5524 - DNA, 33 bp, homo sapiens
aggatgcggactccaayaaaggcattaagaaag

SEQ ID NO: 5525 - DNA, 33 bp, homo sapiens
aaggtctcacaaagtgkagaggattgcatgacc

SEQ ID NO: 5526 - DNA, 33 bp, homo sapiens
gcaagtgagtcttgcargttgcaattatggagt

SEQ ID NO: 5527 - DNA, 33 bp, homo sapiens
cactgtttgattcacasggaagctgggtaggct

SEQ ID NO: 5528 - DNA, 33 bp, homo sapiens
acatcagggtcagcacrgtgcccggaatggggt

SEQ ID NO: 5529 - DNA, 33 bp, homo sapiens
cctaagacactctcgarcactgtaagaggtttt

SEQ ID NO: 5530 - DNA, 33 bp, homo sapiens
atatgatttgattaacrcttaagaccactcagg

SEQ ID NO: 5531 - DNA, 33 bp, homo sapiens
gaaagcaatcacttcaraagaggaatttaccag

SEQ ID NO: 5532 - DNA, 33 bp, homo sapiens
tattgcagtcactactraagtcatccagggtga

SEQ ID NO: 5533 - DNA, 33 bp, homo sapiens
gcctctatcctaagagycccacgtttatttcta

SEQ ID NO: 5534 - DNA, 33 bp, homo sapiens
atctaaaaaggttgaaytcattgaagtgaagag

SEQ ID NO: 5535 - DNA, 33 bp, homo sapiens
aagaggacagtggacartgctgtttaatggtgg

SEQ ID NO: 5536 - DNA, 33 bp, homo sapiens
cagtttctctaacaagycccgatccctctggcc

SEQ ID NO: 5537 - DNA, 33 bp, homo sapiens
agctggtgatgttaaamcagcaaattttattga

SEQ ID NO: 5538 - DNA, 33 bp, homo sapiens
ctttgggaagcttgaasagattttgggtgccca

SEQ ID NO: 5539 - DNA, 33 bp, homo sapiens
tcctaagacacttgacrctaagacatcatcaat

SEQ ID NO: 5540 - DNA, 33 bp, homo sapiens
agcatgcctggcgctawggctcattcctgtaat

SEQ ID NO: 5541 - DNA, 33 bp, homo sapiens
gttcatagatattaaaracctgttcggaagtag

SEQ ID NO: 5542 - DNA, 33 bp, homo sapiens
gaagttcagacaagaargcacggggacaagagt

SEQ ID NO: 5543 - DNA, 33 bp, homo sapiens
tacaccatgccgtcagratcatctcccaacgcc

SEQ ID NO: 5544 - DNA, 33 bp, homo sapiens
aacttacccccatcacraacttggtatagctcc

SEQ ID NO: 5545 - DNA, 33 bp, homo sapiens
tttctctaggagattarcctactttcttggctc

SEQ ID NO: 5546 - DNA, 33 bp, homo sapiens
taaccccctcattcgcrgaggaaaatccaagcc

SEQ ID NO: 5547 - DNA, 33 bp, homo sapiens
aatgaagactagttcakgttagttatttttagt

SEQ ID NO: 5548 - DNA, 33 bp, homo sapiens
taccctcacgaccctcygagctaagtgcagtac

SEQ ID NO: 5549 - DNA, 33 bp, homo sapiens
aaattgttatggcccartgaagagcttgccctt

SEQ ID NO: 5550 - DNA, 33 bp, homo sapiens
cccacaacccggcacawagcaggggttcactac

SEQ ID NO: 5551 - DNA, 33 bp, homo sapiens
atcccctatggatgacrgagagcttacagatga

SEQ ID NO: 5552 - DNA, 33 bp, homo sapiens
agtcagcacctggaaaygaagctttagtcatta

SEQ ID NO: 5553 - DNA, 33 bp, homo sapiens
tgccagcagtaaatcarcaaaattaagtgctat

SEQ ID NO: 5554 - DNA, 33 bp, homo sapiens
cactggaactgtgctakctgaacagaaacaccg

SEQ ID NO: 5555 - DNA, 33 bp, homo sapiens
atgtcactcctctactraaacttctcagggctc

SEQ ID NO: 5556 - DNA, 33 bp, homo sapiens
aaattataatgtggcayaaatagcatatcaatt

SEQ ID NO: 5557 - DNA, 33 bp, homo sapiens
tgatgtattcttcagcmacagtggaattaaact

SEQ ID NO: 5558 - DNA, 33 bp, homo sapiens
ttcatttactagttcckcatgcagtattgggct

SEQ ID NO: 5559 - DNA, 33 bp, homo sapiens
tactatcttggccctakagcagttttatagtct

SEQ ID NO: 5560 - DNA, 33 bp, homo sapiens
aggctctctatctgtayggtccagtgcactagc

SEQ ID NO: 5561 - DNA, 33 bp, homo sapiens
tgctttatttaattgcyatcatttgaaccatca

SEQ ID NO: 5562 - DNA, 33 bp, homo sapiens
gaaaaattctgttctcwcttggagggctcaact

SEQ ID NO: 5563 - DNA, 33 bp, homo sapiens
tgtaggtactcaataaktgtcagtttccttcct

SEQ ID NO: 5564 - DNA, 33 bp, homo sapiens
gtagagatctttagccmagtttacaaaccagaa

SEQ ID NO: 5565 - DNA, 33 bp, homo sapiens
cagctctgtttgtagayaaaatactattatata

SEQ ID NO: 5566 - DNA, 33 bp, homo sapiens
gtaagtacctccctaartgcaggcaaagggaga

SEQ ID NO: 5567 - DNA, 33 bp, homo sapiens
aattagagacataatawtaaccaggatcataat

SEQ ID NO: 5568 - DNA, 33 bp, homo sapiens
agggcacaattagaacrgtacctgtcagatagt

SEQ ID NO: 5569 - DNA, 33 bp, homo sapiens
gagctgatccttagcamccccaacaccctatgc

SEQ ID NO: 5570 - DNA, 33 bp, homo sapiens
tcaggtcccgggtgatsagcttttctgcagtgg

SEQ ID NO: 5571 - DNA, 33 bp, homo sapiens
tgataatggaagataaygtctggggtgcccact

SEQ ID NO: 5572 - DNA, 33 bp, homo sapiens
ggtgtctgggttgtcaratgtcaaagggggagg

SEQ ID NO: 5573 - DNA, 33 bp, homo sapiens
gccctcttcgttcctaygggccaaaaagatttc

SEQ ID NO: 5574 - DNA, 33 bp, homo sapiens
acttttagataaaaacrctggatggccgagcat

SEQ ID NO: 5575 - DNA, 33 bp, homo sapiens
ccagctccacactccasctaccagagaagcctc

SEQ ID NO: 5576 - DNA, 33 bp, homo sapiens
ataaggctttccttccrgcccacacttccagga

SEQ ID NO: 5577 - DNA, 33 bp, homo sapiens
ggctccagggctcagcsacaggtagtgtccaga

SEQ ID NO: 5578 - DNA, 33 bp, homo sapiens
agctgtaagagaggccyacctaaaaggagctgt

SEQ ID NO: 5579 - DNA, 33 bp, homo sapiens
ctaaggtaaagttacayagtatgacgtagaagt

SEQ ID NO: 5580 - DNA, 33 bp, homo sapiens
ggtggttttagttgcascaatgagaacagtaat

SEQ ID NO: 5581 - DNA, 33 bp, homo sapiens
agctcttgggtcaactraagaaaagagagacaa

SEQ ID NO: 5582 - DNA, 33 bp, homo sapiens
tctaacactagaagacrcagaagtattagaaga

SEQ ID NO: 5583 - DNA, 33 bp, homo sapiens
ccatgacagtaccgcayagtagaaattgtactc

SEQ ID NO: 5584 - DNA, 33 bp, homo sapiens
taactaacagatacgcragcaagtctgcctagt

SEQ ID NO: 5585 - DNA, 33 bp, homo sapiens
gaagtgggaaggctgarcacattgatgtaaatc

SEQ ID NO: 5586 - DNA, 33 bp, homo sapiens
gagaaggaacccgtgayaaaaagagcttccgag

SEQ ID NO: 5587 - DNA, 33 bp, homo sapiens
gggtgagagcagcagayggaaggctaaaaaggt

SEQ ID NO: 5588 - DNA, 33 bp, homo sapiens
ttgtataaaagtggcayaattctcttgggaaat

SEQ ID NO: 5589 - DNA, 33 bp, homo sapiens
aaaggctgcttggaatsagtctggatggttttg

SEQ ID NO: 5590 - DNA, 33 bp, homo sapiens
gttcacgtttgtaaacyaagtatgataagtcca

SEQ ID NO: 5591 - DNA, 33 bp, homo sapiens
catcatgaatagacaayggaactttacacagag

SEQ ID NO: 5592 - DNA, 33 bp, homo sapiens
tttgagttatatagacwcatatgtttgaatgac

SEQ ID NO: 5593 - DNA, 33 bp, homo sapiens
cccttcttacagatttsaaaggaaaggattagt

SEQ ID NO: 5594 - DNA, 33 bp, homo sapiens
ggtattgagaacttacygagtgatttcaggctt

SEQ ID NO: 5595 - DNA, 33 bp, homo sapiens
ttttatgctaaaggacratatgggctgggcatg

SEQ ID NO: 5596 - DNA, 33 bp, homo sapiens
tttagaaacaacttgakacttcctggattcctc

SEQ ID NO: 5597 - DNA, 33 bp, homo sapiens
acttcactatgtgaatkaccttagataagttac

SEQ ID NO: 5598 - DNA, 33 bp, homo sapiens
ttgattaacccggaaasagattgaaagacaaca

SEQ ID NO: 5599 - DNA, 33 bp, homo sapiens
ctgccatacatatctgyaaatgactctaggtct

SEQ ID NO: 5600 - DNA, 33 bp, homo sapiens
tttttgccattgctatyacggctgcattcactg

SEQ ID NO: 5601 - DNA, 33 bp, homo sapiens
gtgtcacccgatagcawattctacccctcccac

SEQ ID NO: 5602 - DNA, 33 bp, homo sapiens
atatgtgataaggtgawctctccaactgttgtc

SEQ ID NO: 5603 - DNA, 33 bp, homo sapiens
agaagatgagaatggaratgagtagtagctgga

SEQ ID NO: 5604 - DNA, 33 bp, homo sapiens
gcaagaaaacttagaaytccatgtacaaagtcc

SEQ ID NO: 5605 - DNA, 33 bp, homo sapiens
cagtaaactcaaacaakcttggtgataacgatc

SEQ ID NO: 5606 - DNA, 33 bp, homo sapiens
ctgtttttctgagacarggctacatgaaaacaa

SEQ ID NO: 5607 - DNA, 33 bp, homo sapiens
aaagttgcaacacataycatttgagtcaactta

SEQ ID NO: 5608 - DNA, 33 bp, homo sapiens
tcatgagaagcctgcayataggacacttttcat

SEQ ID NO: 5609 - DNA, 33 bp, homo sapiens
ccaagtgatcactcccractgatgcctgatgca

SEQ ID NO: 5610 - DNA, 33 bp, homo sapiens
ttttgagtgtgttctaygggttaattcaaggaa

SEQ ID NO: 5611 - DNA, 33 bp, homo sapiens
cccacgtcctacattcrcagacagaaaagagac

SEQ ID NO: 5612 - DNA, 33 bp, homo sapiens
cataggtgatcctagasaaaggcatatgatgct

SEQ ID NO: 5613 - DNA, 33 bp, homo sapiens
atgtgaaggcctaggasattagtatacactact

SEQ ID NO: 5614 - DNA, 33 bp, homo sapiens
aaaaagcttgtttgtgmagacttgtaatgataa

SEQ ID NO: 5615 - DNA, 33 bp, homo sapiens
gcaattccaatctaaayatttgttgaagttagc

SEQ ID NO: 5616 - DNA, 33 bp, homo sapiens
actgtagacctttcaayatggatgtttaatcac

SEQ ID NO: 5617 - DNA, 33 bp, homo sapiens
ttgtgtgtacttgtatsagtgttggcataggta

SEQ ID NO: 5618 - DNA, 33 bp, homo sapiens
tcttgtaacttcacatmatgtatcattcttggg

SEQ ID NO: 5619 - DNA, 33 bp, homo sapiens
acaactggagaagacawctttaatacatatttc

SEQ ID NO: 5620 - DNA, 33 bp, homo sapiens
gtaaaaagcaaaaataraacagcgatatttccc

SEQ ID NO: 5621 - DNA, 33 bp, homo sapiens
cactcttgtataatgaraatgtgaaagatgttt

SEQ ID NO: 5622 - DNA, 33 bp, homo sapiens
ggataggataatgaacyggtaaagatgactaag

SEQ ID NO: 5623 - DNA, 33 bp, homo sapiens
tatacctactcttggayctaaggagcctatata

SEQ ID NO: 5624 - DNA, 33 bp, homo sapiens
acttccagaagcattgmataatagtttcagaca

SEQ ID NO: 5625 - DNA, 33 bp, homo sapiens
ttaaaagcaaggcaacrgtaatattttagtcat

SEQ ID NO: 5626 - DNA, 33 bp, homo sapiens
cattgtacaccagttaygtatcaattcccatcg

SEQ ID NO: 5627 - DNA, 33 bp, homo sapiens
tctccagataaaaaaawgtagttctgagcttgg

SEQ ID NO: 5628 - DNA, 33 bp, homo sapiens
agtatccagaggtttayagtaagaggaatttgg

SEQ ID NO: 5629 - DNA, 33 bp, homo sapiens
agcatctagaaataccmatttttccaacctctc

SEQ ID NO: 5630 - DNA, 33 bp, homo sapiens
gacctcaatgctagagraaaatgggcacaagac

SEQ ID NO: 5631 - DNA, 33 bp, homo sapiens
tatgaattaaacctcayggcattgcggaataca

SEQ ID NO: 5632 - DNA, 33 bp, homo sapiens
gaatagataatacctcsaccctctgatttctta

SEQ ID NO: 5633 - DNA, 33 bp, homo sapiens
gtatggaatacaaacaraagaatttcagtctat

SEQ ID NO: 5634 - DNA, 33 bp, homo sapiens
gaaacaatcatcttcamccctctagaatgtcca

SEQ ID NO: 5635 - DNA, 33 bp, homo sapiens
tcacccgcagtaattayatttattcatttccat

SEQ ID NO: 5636 - DNA, 33 bp, homo sapiens
ctatgccaaggtcagayacttgattaggaagag

SEQ ID NO: 5637 - DNA, 33 bp, homo sapiens
atatctaatagatcaawctaccttcctctttag

SEQ ID NO: 5638 - DNA, 33 bp, homo sapiens
tcactatacaaaacacyatcattccacaccctt

SEQ ID NO: 5639 - DNA, 33 bp, homo sapiens
aaaattctgctttcaartaataatttcataaaa

SEQ ID NO: 5640 - DNA, 33 bp, homo sapiens
ataagctcaatcaggcrcagagatgggggaata

SEQ ID NO: 5641 - DNA, 33 bp, homo sapiens
catttagtacaaacacrctcggaaaatataaat

SEQ ID NO: 5642 - DNA, 33 bp, homo sapiens
ggtatatttctttgcayaagttactttaccgct

SEQ ID NO: 5643 - DNA, 33 bp, homo sapiens
tgaagtcaaacattcamattggaagaaagagct

SEQ ID NO: 5644 - DNA, 33 bp, homo sapiens
aacgtcagagcaaatcmctttttctactaaaat

SEQ ID NO: 5645 - DNA, 33 bp, homo sapiens
gctcaggaaatgcctcyataatgaataagcaaa

SEQ ID NO: 5646 - DNA, 33 bp, homo sapiens
tcgctgtgtgaactcayggttcattttcttagc

SEQ ID NO: 5647 - DNA, 33 bp, homo sapiens
aaaacatatggcaacaytgatttaagataatag

SEQ ID NO: 5648 - DNA, 33 bp, homo sapiens
gacaagagatgagcgayggaaaaaggaaggaag

SEQ ID NO: 5649 - DNA, 33 bp, homo sapiens
taaaagccgtttgaggyccacatgaatttttaa

SEQ ID NO: 5650 - DNA, 33 bp, homo sapiens
aaatgcatggtaaacayctatgggtaaccactc

SEQ ID NO: 5651 - DNA, 33 bp, homo sapiens
aaccaacttgataacarcttgttcaaatgaaga

SEQ ID NO: 5652 - DNA, 33 bp, homo sapiens
tatatctatgactccargggtattatttttcct

SEQ ID NO: 5653 - DNA, 33 bp, homo sapiens
cagagctgcgtcaagaratacaataataagtaa

SEQ ID NO: 5654 - DNA, 33 bp, homo sapiens
taaaagaaccgtattaygtggatttccttgagg

SEQ ID NO: 5655 - DNA, 33 bp, homo sapiens
tataaccatcgaggaascattgatatttctaaa

SEQ ID NO: 5656 - DNA, 33 bp, homo sapiens
ctcttctcaaggagtayattagtctgtatttcc

SEQ ID NO: 5657 - DNA, 33 bp, homo sapiens
attactcattggaggcyccttttatatttctct

SEQ ID NO: 5658 - DNA, 33 bp, homo sapiens
aaatattgtatgatgamgttgctaacatctatg

SEQ ID NO: 5659 - DNA, 33 bp, homo sapiens
ataagtactgctagaamatactcaaaactgggc

SEQ ID NO: 5660 - DNA, 33 bp, homo sapiens
aaaaaactgcacgtgcygaatgttgaggtagcc

SEQ ID NO: 5661 - DNA, 33 bp, homo sapiens
tatggcatacaattgasaataaacagggatttg

SEQ ID NO: 5662 - DNA, 33 bp, homo sapiens
gatttcattctttggtyaaaagcttgagaattt

SEQ ID NO: 5663 - DNA, 33 bp, homo sapiens
ctttgtgctagcatcakctgctaaagtctactg

SEQ ID NO: 5664 - DNA, 33 bp, homo sapiens
atttgaccaattgttcraccccaagaggtcaaa

SEQ ID NO: 5665 - DNA, 33 bp, homo sapiens
tttcctcccatctcacygataagtccttcccaa

SEQ ID NO: 5666 - DNA, 33 bp, homo sapiens
gactatgtcaggcaaargaaacatatttgaaag

SEQ ID NO: 5667 - DNA, 33 bp, homo sapiens
gatgctcaattaatacraggatcaggtatttct

SEQ ID NO: 5668 - DNA, 33 bp, homo sapiens
ggaagtcaagatacacratgtgactcctaaaca

SEQ ID NO: 5669 - DNA, 33 bp, homo sapiens
aaatgagaactctcctsaaactaaaatgactga

SEQ ID NO: 5670 - DNA, 33 bp, homo sapiens
tagagaattgagatacrgcaaaacatactctat

SEQ ID NO: 5671 - DNA, 33 bp, homo sapiens
atgtcttaacttccacygtcatctcttctcact

SEQ ID NO: 5672 - DNA, 33 bp, homo sapiens
tattgaaatgataaaayaagtatgcagaaataa

SEQ ID NO: 5673 - DNA, 33 bp, homo sapiens
gtttttgcatagaggargctaaaggtatttaat

SEQ ID NO: 5674 - DNA, 33 bp, homo sapiens
cacccacaagatgaggwcctaacttttttgcat

SEQ ID NO: 5675 - DNA, 33 bp, homo sapiens
aactatgtcaggaaaartgctactatagtgaga

SEQ ID NO: 5676 - DNA, 33 bp, homo sapiens
ttggctagatcagatayagaaaaagcctacatt

SEQ ID NO: 5677 - DNA, 33 bp, homo sapiens
tattattcagcattacyattcctcctaccttta

SEQ ID NO: 5678 - DNA, 33 bp, homo sapiens
cctattagcctataaawagttttctagcagaga

SEQ ID NO: 5679 - DNA, 33 bp, homo sapiens
caaaggtgtaatgtcayggcaaaggcattttta

SEQ ID NO: 5680 - DNA, 33 bp, homo sapiens
ccatgatcttaccttakgctttgtaatagtcac

SEQ ID NO: 5681 - DNA, 33 bp, homo sapiens
aaggtctgcaagttaamccccactaaatctttc

SEQ ID NO: 5682 - DNA, 33 bp, homo sapiens
aactgcacaggagacartgaacttgctttcaca

SEQ ID NO: 5683 - DNA, 33 bp, homo sapiens
tctcaaagtcctatgarcatttctccaaataac

SEQ ID NO: 5684 - DNA, 33 bp, homo sapiens
tagaatctaatgatagraatgctttgtagatat

SEQ ID NO: 5685 - DNA, 33 bp, homo sapiens
caggcagactggtgaargaagctaaaatttgaa

SEQ ID NO: 5686 - DNA, 33 bp, homo sapiens
agattaaaagatcacayagagggagtgaaaata

SEQ ID NO: 5687 - DNA, 33 bp, homo sapiens
ctggattctcatttaargatcctttaggcaact

SEQ ID NO: 5688 - DNA, 33 bp, homo sapiens
ctccacagtgaaattaraacaatcatatgtgcc

SEQ ID NO: 5689 - DNA, 33 bp, homo sapiens
gtgcgttcatggataaygaccctccgaactggg

SEQ ID NO: 5690 - DNA, 33 bp, homo sapiens
tttcggatgcctgctaratgttagaggtttaaa

SEQ ID NO: 5691 - DNA, 33 bp, homo sapiens
ttcatttttgtctaccyccctttgcatatccat

SEQ ID NO: 5692 - DNA, 33 bp, homo sapiens
ttaagtgtgacagagaraaccataatgtggatt

SEQ ID NO: 5693 - DNA, 33 bp, homo sapiens
ccttttagcaaaaataygtcacctacaccatgt

SEQ ID NO: 5694 - DNA, 33 bp, homo sapiens
aatatgttttcaaatcrctattcaaacatattt

SEQ ID NO: 5695 - DNA, 33 bp, homo sapiens
cacccactcttcagtgsagcaaagttgtggatg

SEQ ID NO: 5696 - DNA, 33 bp, homo sapiens
caccaccagcatcttaracctttccttgcctcc

SEQ ID NO: 5697 - DNA, 33 bp, homo sapiens
caaaggaattgtagaastagccaatgtgtacca

SEQ ID NO: 5698 - DNA, 33 bp, homo sapiens
ccatcactaagtcccawgcaaaatgctggtcag

SEQ ID NO: 5699 - DNA, 33 bp, homo sapiens
gtttcactgtctcaagwatcctctatgatctgt

SEQ ID NO: 5700 - DNA, 33 bp, homo sapiens
tcttcattatgacccakctggttacccacagct

SEQ ID NO: 5701 - DNA, 33 bp, homo sapiens
tttaccttgacctcacrgctggcctccaaatta

SEQ ID NO: 5702 - DNA, 33 bp, homo sapiens
gtgtgattgatatgagkaggtcaaaatatctac

SEQ ID NO: 5703 - DNA, 33 bp, homo sapiens
taattcttatctttgcyactttgtgtgtaaact

SEQ ID NO: 5704 - DNA, 33 bp, homo sapiens
tttcctacaaacaacamtagtcctccagcaaag

SEQ ID NO: 5705 - DNA, 33 bp, homo sapiens
atgtttctcaatcttcraagttggaattctttg

SEQ ID NO: 5706 - DNA, 33 bp, homo sapiens
cctctgatttccaaaamccaactgtaaagtgac

SEQ ID NO: 5707 - DNA, 33 bp, homo sapiens
ctgtgtttaccaaaagrataagtcaatgtgggt

SEQ ID NO: 5708 - DNA, 33 bp, homo sapiens
tataggcatatggtgaygaaactttatataact

SEQ ID NO: 5709 - DNA, 33 bp, homo sapiens
taacaaaccttgttaaycttagaaaatatacaa

SEQ ID NO: 5710 - DNA, 33 bp, homo sapiens
cattcagcttattgtasgattctgttccttgcc

SEQ ID NO: 5711 - DNA, 33 bp, homo sapiens
aaaatcagggtgttagmactgtcgggtcctggc

SEQ ID NO: 5712 - DNA, 33 bp, homo sapiens
ctagtgttcatggggaragactcttatggcttg

SEQ ID NO: 5713 - DNA, 33 bp, homo sapiens
attctgcccatgtaagraaaagtatccttcttc

SEQ ID NO: 5714 - DNA, 33 bp, homo sapiens
ctccttttctgtgataygttttgaaaataattt

SEQ ID NO: 5715 - DNA, 33 bp, homo sapiens
cttgtagatcacagcaraattgggcagaaagaa

SEQ ID NO: 5716 - DNA, 33 bp, homo sapiens
ttaaacatattttttcrcctttactctacatga

SEQ ID NO: 5717 - DNA, 33 bp, homo sapiens
attggtacataccttgmacttacacgagttgta

SEQ ID NO: 5718 - DNA, 33 bp, homo sapiens
attcttcatggcagaaytgttaaccaagacatg

SEQ ID NO: 5719 - DNA, 33 bp, homo sapiens
ccctgctacccagtagkagtcacgtcctggaca

SEQ ID NO: 5720 - DNA, 33 bp, homo sapiens
tgtagagcttaaaagaraagactgagttgtatt

SEQ ID NO: 5721 - DNA, 33 bp, homo sapiens
gcaagagcatactcaayggatctttcttccact

SEQ ID NO: 5722 - DNA, 33 bp, homo sapiens
caagaatcacaatttgkaagaagaacattactt

SEQ ID NO: 5723 - DNA, 33 bp, homo sapiens
ccactttggcatctcayagaggtgttgttagaa

SEQ ID NO: 5724 - DNA, 33 bp, homo sapiens
actatgtgaaaaaaaawttgaggtcagaaatga

SEQ ID NO: 5725 - DNA, 33 bp, homo sapiens
aactatcttggtaatcrcaaagcacatttcagt

SEQ ID NO: 5726 - DNA, 33 bp, homo sapiens
acaataaactttccaawgctgtgctcataaatt

SEQ ID NO: 5727 - DNA, 33 bp, homo sapiens
gaatgacttccatcaawgtcccttatctctttg

SEQ ID NO: 5728 - DNA, 33 bp, homo sapiens
tttcttttatcagacartagatcccatttattt

SEQ ID NO: 5729 - DNA, 33 bp, homo sapiens
ttaatcattttggcaaycttatattgtagggat

SEQ ID NO: 5730 - DNA, 33 bp, homo sapiens
gtttaatgagactatcrctttctgaacttttgg

SEQ ID NO: 5731 - DNA, 33 bp, homo sapiens
agcctcttatttttcamtcagctaagatgagta

SEQ ID NO: 5732 - DNA, 33 bp, homo sapiens
attattagaggcaccaytgaggtttcatctcat

SEQ ID NO: 5733 - DNA, 33 bp, homo sapiens
tctgactttgtagcacrcaagtagccatagaca

SEQ ID NO: 5734 - DNA, 33 bp, homo sapiens
agataataaggcctgayaagtatgtgttgagtg

SEQ ID NO: 5735 - DNA, 33 bp, homo sapiens
gttaagtgataatagcmacctgcccttctgcct

SEQ ID NO: 5736 - DNA, 33 bp, homo sapiens
ttgtaaatgcaaggtgrcaaggaaggtacacta

SEQ ID NO: 5737 - DNA, 33 bp, homo sapiens
tgcagattacgtgtgcsaaacacagctgggctt

SEQ ID NO: 5738 - DNA, 33 bp, homo sapiens
gacctatttgagttacragctgatgttagtttt

SEQ ID NO: 5739 - DNA, 33 bp, homo sapiens
ttcaaacatgtcaaaamtgtgtagtgtgaagaa

SEQ ID NO: 5740 - DNA, 33 bp, homo sapiens
gattttcattgcctagkacaaggtcaggtactt

SEQ ID NO: 5741 - DNA, 33 bp, homo sapiens
agttgcaaggactagasagaactcagccaaatg

SEQ ID NO: 5742 - DNA, 33 bp, homo sapiens
aacatgacatgcctgcrgaaatatgaacaagca

SEQ ID NO: 5743 - DNA, 33 bp, homo sapiens
tatggagacatcctcargcaaatggcctcctgc

SEQ ID NO: 5744 - DNA, 33 bp, homo sapiens
atatacaccaacttacraaaatgtgtcaggtga

SEQ ID NO: 5745 - DNA, 33 bp, homo sapiens
aagcagctacagcaagsctccaatttagagctc

SEQ ID NO: 5746 - DNA, 33 bp, homo sapiens
tactaataactaaaagrctataaagcaggtaat

SEQ ID NO: 5747 - DNA, 33 bp, homo sapiens
gcttgtttactccctgmaaattaatgagattca

SEQ ID NO: 5748 - DNA, 33 bp, homo sapiens
gacaaattcctacatcmaaatctgaaataaaca

SEQ ID NO: 5749 - DNA, 33 bp, homo sapiens
acatggatgaatcttawgttgagttaaataaaa

SEQ ID NO: 5750 - DNA, 33 bp, homo sapiens
tctgctaaaattgcagyagccacatagggctgg

SEQ ID NO: 5751 - DNA, 33 bp, homo sapiens
tatttttgtgtacataygaaatctgaaagctca

SEQ ID NO: 5752 - DNA, 33 bp, homo sapiens
agatgcaaaactaaacmatattacctatcttag

SEQ ID NO: 5753 - DNA, 33 bp, homo sapiens
tatggttggaggtagaratactgctagtgtacc

SEQ ID NO: 5754 - DNA, 33 bp, homo sapiens
atctagagggaatccaycatttaggacagaaaa

SEQ ID NO: 5755 - DNA, 33 bp, homo sapiens
attttcttttaaactcrcaagtgtcaagatgtc

SEQ ID NO: 5756 - DNA, 33 bp, homo sapiens
ttaaatcatacagaaawtaagtaggaaaatcgt

SEQ ID NO: 5757 - DNA, 33 bp, homo sapiens
atgcggcacaaattcasccgtcagcatatttta

SEQ ID NO: 5758 - DNA, 33 bp, homo sapiens
atgactatcataagcawccatgaaatcaaaact

SEQ ID NO: 5759 - DNA, 33 bp, homo sapiens
tcatatagataaagaamcagtgaagctgacctg

SEQ ID NO: 5760 - DNA, 33 bp, homo sapiens
atatcaaagtccaaatsaaatttataaagaaaa

SEQ ID NO: 5761 - DNA, 33 bp, homo sapiens
agcaattattcattgastacctacttttaccta

SEQ ID NO: 5762 - DNA, 33 bp, homo sapiens
tttgagaataaagcacratacctcacagccaac

SEQ ID NO: 5763 - DNA, 33 bp, homo sapiens
gaaactcaagtagataygtttctcagtactgaa

SEQ ID NO: 5764 - DNA, 33 bp, homo sapiens
ctgtagtagactgaacycttcaagtgtctgtca

SEQ ID NO: 5765 - DNA, 33 bp, homo sapiens
cactgaagaagtttcaraaggctaaattcttct

SEQ ID NO: 5766 - DNA, 33 bp, homo sapiens
aagcttacgtcaacaawgtagaagagctaagga

SEQ ID NO: 5767 - DNA, 33 bp, homo sapiens
gctcaatacacagtacrgcgggggcgctcctcc

SEQ ID NO: 5768 - DNA, 33 bp, homo sapiens
ttcatcacacctataaratgcctagcgtactac

SEQ ID NO: 5769 - DNA, 33 bp, homo sapiens
tgttgtctgtaagctarcgtcataacattcttt

SEQ ID NO: 5770 - DNA, 33 bp, homo sapiens
aaaagacaaacattgaygaatggaatagaatag

SEQ ID NO: 5771 - DNA, 33 bp, homo sapiens
caagacattctctgaakctcaggactgtttttt

SEQ ID NO: 5772 - DNA, 33 bp, homo sapiens
gaaagtttggaatgagwctactaaattaacttt

SEQ ID NO: 5773 - DNA, 33 bp, homo sapiens
ttcctgttattataccratagtttcattctcct

SEQ ID NO: 5774 - DNA, 33 bp, homo sapiens
acttccatgttgattgyagcattattaacaata

SEQ ID NO: 5775 - DNA, 33 bp, homo sapiens
ggtgagcaacaagtaasatcctgatatggtttc

SEQ ID NO: 5776 - DNA, 33 bp, homo sapiens
taatttcagatgtgtawatctttgctataattt

SEQ ID NO: 5777 - DNA, 33 bp, homo sapiens
tgattttttcctcaaascataaagacaaaattt

SEQ ID NO: 5778 - DNA, 33 bp, homo sapiens
ttaggcatatgaaacastgcaaagaatggtaaa

SEQ ID NO: 5779 - DNA, 33 bp, homo sapiens
atttactttctttggcyattattttgtccttct

SEQ ID NO: 5780 - DNA, 33 bp, homo sapiens
ggtgcaactaacaaaaratcccaacagtctgat

SEQ ID NO: 5781 - DNA, 33 bp, homo sapiens
aattaaaaagacagcartaatgttcctatgtat

SEQ ID NO: 5782 - DNA, 33 bp, homo sapiens
cagctgtgagtacaacratgtgctgagtcccat

SEQ ID NO: 5783 - DNA, 33 bp, homo sapiens
ttatgtttgatcatagyagtcaggaaaggatgg

SEQ ID NO: 5784 - DNA, 33 bp, homo sapiens
acaagcagtaatccaargcaaactgtaccaatc

SEQ ID NO: 5785 - DNA, 33 bp, homo sapiens
attatgggaactaataygagcaaatttctgttc

SEQ ID NO: 5786 - DNA, 33 bp, homo sapiens
tggactcattataaaamagccaggttttccatg

SEQ ID NO: 5787 - DNA, 33 bp, homo sapiens
acctcttctgaccactraactaaaccacgtaca

SEQ ID NO: 5788 - DNA, 33 bp, homo sapiens
tgagataattcaagaaygtaatacctgttgcaa

SEQ ID NO: 5789 - DNA, 33 bp, homo sapiens
agaattctatattatgyatagcaaatgagccaa

SEQ ID NO: 5790 - DNA, 33 bp, homo sapiens
agtgttatatttaaggkatatggaagtgtttgc

SEQ ID NO: 5791 - DNA, 33 bp, homo sapiens
gggtcaaagagactagraaaacatatgtgttgt

SEQ ID NO: 5792 - DNA, 33 bp, homo sapiens
atacccatgtaacaaamcttcatgtcatataca

SEQ ID NO: 5793 - DNA, 33 bp, homo sapiens
aagcaaagaactgttayctattcctactccatt

SEQ ID NO: 5794 - DNA, 33 bp, homo sapiens
gcactacaagatactcyagactcatttgtatgt

SEQ ID NO: 5795 - DNA, 33 bp, homo sapiens
gataagtaatatggtasatggtgccttgggcta

SEQ ID NO: 5796 - DNA, 33 bp, homo sapiens
tctctacctagtgaccyatttctgccttcttac

SEQ ID NO: 5797 - DNA, 33 bp, homo sapiens
ttctttgggaattgtckagaatcccggcacttt

SEQ ID NO: 5798 - DNA, 33 bp, homo sapiens
aactactttgctaagcrcaatgtttaggtcagc

SEQ ID NO: 5799 - DNA, 33 bp, homo sapiens
aacttcagtccttaacrcctcagaagaaacaat

SEQ ID NO: 5800 - DNA, 33 bp, homo sapiens
acagtatgaatcaaccygcttctggatttcccc

SEQ ID NO: 5801 - DNA, 33 bp, homo sapiens
agacaagcagactaaakccaaatgcccagctga

SEQ ID NO: 5802 - DNA, 33 bp, homo sapiens
tctagaggaaaaataayccattgctttcacaaa

SEQ ID NO: 5803 - DNA, 33 bp, homo sapiens
gtccttcaacagaatcrattgtaaaatagtcat

SEQ ID NO: 5804 - DNA, 33 bp, homo sapiens
ttctatttatcttcacwcataattaacactgaa

SEQ ID NO: 5805 - DNA, 33 bp, homo sapiens
gagttatgtttctgaawtctcattgggaccctc

SEQ ID NO: 5806 - DNA, 33 bp, homo sapiens
aatcagactgggagaamaaagtggaatgcttgt

SEQ ID NO: 5807 - DNA, 33 bp, homo sapiens
accttcaacaacttccratggtttactaaatta

SEQ ID NO: 5808 - DNA, 33 bp, homo sapiens
caaacatttagaagccrgacaagtaggatgaga

SEQ ID NO: 5809 - DNA, 33 bp, homo sapiens
atgttcctagttcttaycatttgtatcagtttg

SEQ ID NO: 5810 - DNA, 33 bp, homo sapiens
gtactgttgcactggarattaagtttcaccatg

SEQ ID NO: 5811 - DNA, 33 bp, homo sapiens
caagaaacccaaaaacraggcagatgtaggtca

SEQ ID NO: 5812 - DNA, 33 bp, homo sapiens
ggccgcaagacaggtakatttctgcattgttac

SEQ ID NO: 5813 - DNA, 33 bp, homo sapiens
tttgaaagcaggaaaaktacaatatatttgagg

SEQ ID NO: 5814 - DNA, 33 bp, homo sapiens
tcagcaatgtgttgaaytggattcagttgaact

SEQ ID NO: 5815 - DNA, 33 bp, homo sapiens
gggaggagctgtacacygtcagaggagatctag

SEQ ID NO: 5816 - DNA, 33 bp, homo sapiens
tagccataagaaagaaraaagttctctgtgaac

SEQ ID NO: 5817 - DNA, 33 bp, homo sapiens
gctaagaggaaggatcractgtgaatggcaaaa

SEQ ID NO: 5818 - DNA, 33 bp, homo sapiens
ttacgttgtaagtaacraaaattatggataacc

SEQ ID NO: 5819 - DNA, 33 bp, homo sapiens
tgaatgatttagaaatraactatccacatatag

SEQ ID NO: 5820 - DNA, 33 bp, homo sapiens
agcttggtgcaatgackgactccaatattttat

SEQ ID NO: 5821 - DNA, 33 bp, homo sapiens
tgcatcagagagacccrgaaaaacagtagctcc

SEQ ID NO: 5822 - DNA, 33 bp, homo sapiens
tcaacggtatttgaaayctgacaaaaggcacat

SEQ ID NO: 5823 - DNA, 33 bp, homo sapiens
tccttttgcttattaamacccagtaggtagttc

SEQ ID NO: 5824 - DNA, 33 bp, homo sapiens
tttgtttcaaaacccayaatttggatgcaatag

SEQ ID NO: 5825 - DNA, 33 bp, homo sapiens
tccaaaattgtgagaartaagttagtgttattt

SEQ ID NO: 5826 - DNA, 33 bp, homo sapiens
tgaagcaaagcatataycaaacctaatctattg

SEQ ID NO: 5827 - DNA, 33 bp, homo sapiens
accctgaactcctgccscatgttgcttaccatt

SEQ ID NO: 5828 - DNA, 33 bp, homo sapiens
attgtactgtgggccargacaatgaatgccagg

SEQ ID NO: 5829 - DNA, 33 bp, homo sapiens
tacttttataaattacmcttattagcagcctga

SEQ ID NO: 5830 - DNA, 33 bp, homo sapiens
tatagctctgtattaaytggttttttaaatatt

SEQ ID NO: 5831 - DNA, 33 bp, homo sapiens
gtattcaggagttgcaraatttggaaagggatt

SEQ ID NO: 5832 - DNA, 33 bp, homo sapiens
tggtagcccttggaaastagtagattgaagagg

SEQ ID NO: 5833 - DNA, 33 bp, homo sapiens
atactctatagcacaargtgaagatacaaatat

SEQ ID NO: 5834 - DNA, 33 bp, homo sapiens
tggtggcataaaattgyacacataccacgagaa

SEQ ID NO: 5835 - DNA, 33 bp, homo sapiens
gggcaatagggcgaaaytccatctccaaaaaaa

SEQ ID NO: 5836 - DNA, 33 bp, homo sapiens
gagattttgataaagcrgagaagaacaagaaat

SEQ ID NO: 5837 - DNA, 33 bp, homo sapiens
aactcacagtatcctaygataatttttgcttta

SEQ ID NO: 5838 - DNA, 33 bp, homo sapiens
ttcatctttaacaccawcttgtctcttcttaaa

SEQ ID NO: 5839 - DNA, 33 bp, homo sapiens
ataaaaaaggctatcaygttgttcaataaattc

SEQ ID NO: 5840 - DNA, 33 bp, homo sapiens
tgactgagctccagtargtggcaactgactttt

SEQ ID NO: 5841 - DNA, 33 bp, homo sapiens
gctgctaataagcttcyccttggttacacagcc

SEQ ID NO: 5842 - DNA, 33 bp, homo sapiens
tcctaggtttcacaaakagcacctcacttacaa

SEQ ID NO: 5843 - DNA, 33 bp, homo sapiens
tggaaaggaacatttaycatttgtcacaaaata

SEQ ID NO: 5844 - DNA, 33 bp, homo sapiens
ttgtagtcttagccaargtgtatgtccctaatt

SEQ ID NO: 5845 - DNA, 33 bp, homo sapiens
taagcaatacaccaaaracttcagagggacatg

SEQ ID NO: 5846 - DNA, 33 bp, homo sapiens
aagaagttcatgagccraagaatgtggtagcct

SEQ ID NO: 5847 - DNA, 33 bp, homo sapiens
gttggtttaaatgggcyacttccagaatttctg

SEQ ID NO: 5848 - DNA, 33 bp, homo sapiens
tatagaaaaatatcacygcacttcaagggttga

SEQ ID NO: 5849 - DNA, 33 bp, homo sapiens
tcagtggtaagatcaaygaaggatcaaactatc

SEQ ID NO: 5850 - DNA, 33 bp, homo sapiens
atagttcctccaagacragaactggtgatttcc

SEQ ID NO: 5851 - DNA, 33 bp, homo sapiens
tgatctcaggatgtgamaaaaggcatttcttat

SEQ ID NO: 5852 - DNA, 33 bp, homo sapiens
caatgaactattagccraaatagcatatctatg

SEQ ID NO: 5853 - DNA, 33 bp, homo sapiens
ttccttttactaatcaygtgtatctaggagcaa

SEQ ID NO: 5854 - DNA, 33 bp, homo sapiens
tgaatccatgaggatgwagtgatatgtagacat

SEQ ID NO: 5855 - DNA, 33 bp, homo sapiens
tcctaccctcaaaaaasttatattccaatacag

SEQ ID NO: 5856 - DNA, 33 bp, homo sapiens
tgagaataatgcttaayacagaggtctgttgtg

SEQ ID NO: 5857 - DNA, 33 bp, homo sapiens
gaagtacagaacaatcragcactaaaaaaaatt

SEQ ID NO: 5858 - DNA, 33 bp, homo sapiens
ggctatttttcactcaytctatcaaggaacgtg

SEQ ID NO: 5859 - DNA, 33 bp, homo sapiens
tggaacagcatcccagmaaaaaataagtgctaa

SEQ ID NO: 5860 - DNA, 33 bp, homo sapiens
tgttacagtactttacycactcacaaacacata

SEQ ID NO: 5861 - DNA, 33 bp, homo sapiens
caattaggcagaaggcrattttatttattttta

SEQ ID NO: 5862 - DNA, 33 bp, homo sapiens
atataggtataactccraagtttttagcctgag

SEQ ID NO: 5863 - DNA, 33 bp, homo sapiens
tattatgaaatggtacygcatgggaggctaaat

SEQ ID NO: 5864 - DNA, 33 bp, homo sapiens
gtcacctgatgaaagargtttccagaaattcga

SEQ ID NO: 5865 - DNA, 33 bp, homo sapiens
ctggaaatagacaatamtaatcctcaaaaatta

SEQ ID NO: 5866 - DNA, 33 bp, homo sapiens
actgactacataaaacyatacagaactaccact

SEQ ID NO: 5867 - DNA, 33 bp, homo sapiens
gctgttaccttagtcaktaggtcttaggatagc

SEQ ID NO: 5868 - DNA, 33 bp, homo sapiens
tgtccatcaagaaatcyagagtaaaggcaggag

SEQ ID NO: 5869 - DNA, 33 bp, homo sapiens
gttgtagaaattgatcwaatggccattattttc

SEQ ID NO: 5870 - DNA, 33 bp, homo sapiens
ctgctaagtagcaaaargtcctcattttaaatt

SEQ ID NO: 5871 - DNA, 33 bp, homo sapiens
gacagataaaacaacasgtaaagggctttgaga

SEQ ID NO: 5872 - DNA, 33 bp, homo sapiens
tataagtcaaccaatawgatatgagaaatttga

SEQ ID NO: 5873 - DNA, 33 bp, homo sapiens
tcccagtgggagatgayataggatagaatggaa

SEQ ID NO: 5874 - DNA, 33 bp, homo sapiens
tcaacattatagatgckgacagataaaatagcc

SEQ ID NO: 5875 - DNA, 33 bp, homo sapiens
ttattaactcacttatraagctctgttactctt

SEQ ID NO: 5876 - DNA, 33 bp, homo sapiens
tataagatagacatacrgagggcaaagcaaata

SEQ ID NO: 5877 - DNA, 33 bp, homo sapiens
aaataattgatgacagragaaaacgcagaacag

SEQ ID NO: 5878 - DNA, 33 bp, homo sapiens
gacctgccaaattgcargaccgaaaaagctgta

SEQ ID NO: 5879 - DNA, 33 bp, homo sapiens
ctgaaacactcactgcrataagctgtaacagta

SEQ ID NO: 5880 - DNA, 33 bp, homo sapiens
cggcagttataccacawgaagccttcaaaatta

SEQ ID NO: 5881 - DNA, 33 bp, homo sapiens
tttgattgttgaactgkaaaatcaatatgtatt

SEQ ID NO: 5882 - DNA, 33 bp, homo sapiens
tagctatgcagagatargaagagtgcttgaacc

SEQ ID NO: 5883 - DNA, 33 bp, homo sapiens
agctctagtgaatcaarattaaatactatcagg

SEQ ID NO: 5884 - DNA, 33 bp, homo sapiens
ccagtactgttgagaartagcatcaatgaggaa

SEQ ID NO: 5885 - DNA, 33 bp, homo sapiens
aaactacaatatacaawacccagtgtcctgtga

SEQ ID NO: 5886 - DNA, 33 bp, homo sapiens
gacccacagtgctgtgracaaaaagtgatgcat

SEQ ID NO: 5887 - DNA, 33 bp, homo sapiens
gtctacagtgactctamggctgtggtatccaga

SEQ ID NO: 5888 - DNA, 33 bp, homo sapiens
ttttcacctagcttacycatttactaactacct

SEQ ID NO: 5889 - DNA, 33 bp, homo sapiens
aagtttagagtgaacasagaatgaatcatgatt

SEQ ID NO: 5890 - DNA, 33 bp, homo sapiens
gatcatattgttctccyactttgtgagtaatgc

SEQ ID NO: 5891 - DNA, 33 bp, homo sapiens
aatacagaattgcataktaaatacacacttttc

SEQ ID NO: 5892 - DNA, 33 bp, homo sapiens
gtattagcaaaacaacrgacaaatagatcaatg

SEQ ID NO: 5893 - DNA, 33 bp, homo sapiens
ttagttctctgtgatartacgggtttatacgtt

SEQ ID NO: 5894 - DNA, 33 bp, homo sapiens
tctgctttgccaggacygagtgagttagctgca

SEQ ID NO: 5895 - DNA, 33 bp, homo sapiens
ctctcatttcagagatkagaaaacatgaagcat

SEQ ID NO: 5896 - DNA, 33 bp, homo sapiens
ctgatgctgagtcagcrccacaatggacagaaa

SEQ ID NO: 5897 - DNA, 33 bp, homo sapiens
tactttaacagtatcargtgtttcctttgtact

SEQ ID NO: 5898 - DNA, 33 bp, homo sapiens
gccctcatgggacttamattttggttgagggag

SEQ ID NO: 5899 - DNA, 33 bp, homo sapiens
gtttcccaaatgcaaasttaactgacttattat

SEQ ID NO: 5900 - DNA, 33 bp, homo sapiens
tctagttgctctcatawcctttttgaagtattt

SEQ ID NO: 5901 - DNA, 33 bp, homo sapiens
cttctgattcataaaargaggccagtgagggaa

SEQ ID NO: 5902 - DNA, 33 bp, homo sapiens
aagctgcatactctccraaatgatttagtatta

SEQ ID NO: 5903 - DNA, 33 bp, homo sapiens
atgactctgggtggcayacttaacctctccaag

SEQ ID NO: 5904 - DNA, 33 bp, homo sapiens
tggttatcaaccccccrcagaacacaaagcccc

SEQ ID NO: 5905 - DNA, 33 bp, homo sapiens
ggaatttggaaaccaaratctcggtgatttgtg

SEQ ID NO: 5906 - DNA, 33 bp, homo sapiens
gatatcccagttgtaargagcacacaaatcacc

SEQ ID NO: 5907 - DNA, 33 bp, homo sapiens
tttttaaataatgacasagatgcccaaaagaaa

SEQ ID NO: 5908 - DNA, 33 bp, homo sapiens
cctgcctttgtacttcyacctgtgaaatcagga

SEQ ID NO: 5909 - DNA, 33 bp, homo sapiens
agaactggggatcccasatcagtccagggccaa

SEQ ID NO: 5910 - DNA, 33 bp, homo sapiens
aaagacccaggtacgcrctaattcttctttttt

SEQ ID NO: 5911 - DNA, 33 bp, homo sapiens
ccagtggggcacataarcatctctctgtgggtg

SEQ ID NO: 5912 - DNA, 33 bp, homo sapiens
actgaagatggaaagarcctggtacccaaatca

SEQ ID NO: 5913 - DNA, 33 bp, homo sapiens
agagagtcacgtacgaygtcaccaggtatctgc

SEQ ID NO: 5914 - DNA, 33 bp, homo sapiens
agagagaggatgctaasattaattgagctctta

SEQ ID NO: 5915 - DNA, 33 bp, homo sapiens
agaaccctaacaaaagmactgcatgactacttg

SEQ ID NO: 5916 - DNA, 33 bp, homo sapiens
gaggaagacttgctccragaaccctaacaaaag

SEQ ID NO: 5917 - DNA, 33 bp, homo sapiens
gaagccagatccagtaygagcaggtgtgcgtga

SEQ ID NO: 5918 - DNA, 33 bp, homo sapiens
gttcttctggtaacatraggcagcaaagtgctc

SEQ ID NO: 5919 - DNA, 33 bp, homo sapiens
cctggtaacaacagaaygtgatggactttaggg

SEQ ID NO: 5920 - DNA, 33 bp, homo sapiens
cagtgagacaacatatraatgtgctttggtagg

SEQ ID NO: 5921 - DNA, 33 bp, homo sapiens
ttgtttttgtctcaaaytaagagcttactattg

SEQ ID NO: 5922 - DNA, 33 bp, homo sapiens
catggtctggaactagyaggatgattcctctac

SEQ ID NO: 5923 - DNA, 33 bp, homo sapiens
tgatgctgctaactcamaaatgatcagggctga

SEQ ID NO: 5924 - DNA, 33 bp, homo sapiens
tgcccaagagtccttayctggaacctctggtct

SEQ ID NO: 5925 - DNA, 33 bp, homo sapiens
cttttctctaacaagarccaataaaaagcaacc

SEQ ID NO: 5926 - DNA, 33 bp, homo sapiens
ctgaccgctgagattcragaccctctggagaac

SEQ ID NO: 5927 - DNA, 33 bp, homo sapiens
accaacggaagaataaygcttctaaagtctcac

SEQ ID NO: 5928 - DNA, 33 bp, homo sapiens
taacagctgagcagcaraaatacaaagacagca

SEQ ID NO: 5929 - DNA, 33 bp, homo sapiens
aattcatgtattttccscactttacagataaga

SEQ ID NO: 5930 - DNA, 33 bp, homo sapiens
aaatcctgacaaggtaraaatgagacagctgaa

SEQ ID NO: 5931 - DNA, 33 bp, homo sapiens
ggacattctagtcctcmaatatacctctcatcc

SEQ ID NO: 5932 - DNA, 33 bp, homo sapiens
agatgaacttcaacaarttattttgccactcca

SEQ ID NO: 5933 - DNA, 33 bp, homo sapiens
gtggatgtgaactgatracaatgatataaattt

SEQ ID NO: 5934 - DNA, 33 bp, homo sapiens
caggctaacagttgccrggatcatgaccattct

SEQ ID NO: 5935 - DNA, 33 bp, homo sapiens
atttggggccatacccyagctcagcacagaagc

SEQ ID NO: 5936 - DNA, 33 bp, homo sapiens
atagttcatcatgagarccattatggcagagca

SEQ ID NO: 5937 - DNA, 33 bp, homo sapiens
actgtgttttgaaggasattggaatttctgcct

SEQ ID NO: 5938 - DNA, 33 bp, homo sapiens
attcaactttccaaaaygttctaaatgtcatga

SEQ ID NO: 5939 - DNA, 33 bp, homo sapiens
gtcctgggtcaaataasgtttacagtttgggat

SEQ ID NO: 5940 - DNA, 33 bp, homo sapiens
ggagggaattgtgaatragaggagtctagaagt

SEQ ID NO: 5941 - DNA, 33 bp, homo sapiens
accggactgtcctaaaygttctgtgggcaatgg

SEQ ID NO: 5942 - DNA, 33 bp, homo sapiens
cagaaaaatcaaggccrgctgcaagatttctga

SEQ ID NO: 5943 - DNA, 33 bp, homo sapiens
caaaatgaatgtgtcartaccctccaaaaaatg

SEQ ID NO: 5944 - DNA, 33 bp, homo sapiens
ctggagctatacttackgcccacgtccccacca

SEQ ID NO: 5945 - DNA, 33 bp, homo sapiens
tggtcagagaagaaaaygcctacatttgatcat

SEQ ID NO: 5946 - DNA, 33 bp, homo sapiens
tcaagccaaaaatgaaratgctgaaagataaaa

SEQ ID NO: 5947 - DNA, 33 bp, homo sapiens
gctacgtgagaaaaagragacatgtagaggact

SEQ ID NO: 5948 - DNA, 33 bp, homo sapiens
gaaatttgataatggcyctgtataccagtcttc

SEQ ID NO: 5949 - DNA, 33 bp, homo sapiens
agctccatctccgttgyactgcacggtacagcc

SEQ ID NO: 5950 - DNA, 33 bp, homo sapiens
caggttccatgacagaytcagtcagatgtattt

SEQ ID NO: 5951 - DNA, 33 bp, homo sapiens
ccagcctccacaatggycaatgatccctgcctc

SEQ ID NO: 5952 - DNA, 33 bp, homo sapiens
cactctccattttcccwactacaaaatacctgt

SEQ ID NO: 5953 - DNA, 33 bp, homo sapiens
ataatcaaagtaatcartagaagacagagtcag

SEQ ID NO: 5954 - DNA, 33 bp, homo sapiens
aacaatgcaacgttccygatttctaatcttggt

SEQ ID NO: 5955 - DNA, 33 bp, homo sapiens
ccttaggtcttccacayggaccatccctctgcc

SEQ ID NO: 5956 - DNA, 33 bp, homo sapiens
gcccaaacctaagcgartcctcacaacggaggc

SEQ ID NO: 5957 - DNA, 33 bp, homo sapiens
taggcagggttcctagkatgaagaccggggatc

SEQ ID NO: 5958 - DNA, 33 bp, homo sapiens
cttggtggctgtcaaartgtcctttttttagag

SEQ ID NO: 5959 - DNA, 33 bp, homo sapiens
tctggaaaatgttccaygtgcaattgaggaaaa

SEQ ID NO: 5960 - DNA, 33 bp, homo sapiens
ctggatggcatttagargaatgtgtggaaaatg

SEQ ID NO: 5961 - DNA, 33 bp, homo sapiens
acttaggcaatcataaygagtgaggagtctgac

SEQ ID NO: 5962 - DNA, 33 bp, homo sapiens
ccttgcttcagtcttcrcacttacaattaacat

SEQ ID NO: 5963 - DNA, 33 bp, homo sapiens
ttaagagtagaagtcartactcaatggtgacca

SEQ ID NO: 5964 - DNA, 33 bp, homo sapiens
ggtcaaaggtctattawgggaatttgataagct

SEQ ID NO: 5965 - DNA, 33 bp, homo sapiens
aaaagttggtatgtggraagataaaaattcttt

SEQ ID NO: 5966 - DNA, 33 bp, homo sapiens
catgcctcttgtataamctaacaattttctccc

SEQ ID NO: 5967 - DNA, 33 bp, homo sapiens
ttttattaggaagatgsaaaatattatcaagat

SEQ ID NO: 5968 - DNA, 33 bp, homo sapiens
aagaacactgggcttaratggctagacaccaga

SEQ ID NO: 5969 - DNA, 33 bp, homo sapiens
attaccatatctgcatyatatcaccctcattgg

SEQ ID NO: 5970 - DNA, 33 bp, homo sapiens
tcttgttggcctaacayagagctttggaattgc

SEQ ID NO: 5971 - DNA, 33 bp, homo sapiens
ctacttttacattcccrgaagagttgatctaat

SEQ ID NO: 5972 - DNA, 33 bp, homo sapiens
tggacaattgattactraagatatggctactct

SEQ ID NO: 5973 - DNA, 33 bp, homo sapiens
gtctgaatgctaagccratgaatcctaactcta

SEQ ID NO: 5974 - DNA, 33 bp, homo sapiens
ccctgtgttttataccyggagattctggctgat

SEQ ID NO: 5975 - DNA, 33 bp, homo sapiens
cagtagaccagagaccmagactgtcccctttcc

SEQ ID NO: 5976 - DNA, 33 bp, homo sapiens
tagtacctaactgaaayggtcttgagatcattc

SEQ ID NO: 5977 - DNA, 33 bp, homo sapiens
gaacgtattatgtgccrgacactatttgaaatg

SEQ ID NO: 5978 - DNA, 33 bp, homo sapiens
tttgctccctctattayggtgtagccctctagg

SEQ ID NO: 5979 - DNA, 33 bp, homo sapiens
tgaagtagagtggagayggaaagcactagggct

SEQ ID NO: 5980 - DNA, 33 bp, homo sapiens
actctgctgttgaccasaccttcagcagacgtg

SEQ ID NO: 5981 - DNA, 33 bp, homo sapiens
ctttcagacctacatayaagaagtgctaaaggg

SEQ ID NO: 5982 - DNA, 33 bp, homo sapiens
ccagcttcattttgtasctaagagagtagagtg

SEQ ID NO: 5983 - DNA, 33 bp, homo sapiens
tatcaccaccatccatyactaacctagtccaca

SEQ ID NO: 5984 - DNA, 33 bp, homo sapiens
tgaatgctcaaagtaaygttctgtcctgatctt

SEQ ID NO: 5985 - DNA, 33 bp, homo sapiens
ttattccatactcgcakataatgtctcagtagc

SEQ ID NO: 5986 - DNA, 33 bp, homo sapiens
gcagttgcagcctgtarcctagtcaacatagat

SEQ ID NO: 5987 - DNA, 33 bp, homo sapiens
aattagccaacttgcarcattaacataagcaaa

SEQ ID NO: 5988 - DNA, 33 bp, homo sapiens
aactaaattgaggtcaytattagctgagtaagg

SEQ ID NO: 5989 - DNA, 33 bp, homo sapiens
ataataccttttcatargagtgcttacaaaatt

SEQ ID NO: 5990 - DNA, 33 bp, homo sapiens
tatatatcctggcttgkaaaaatttagatctgc

SEQ ID NO: 5991 - DNA, 33 bp, homo sapiens
aatagatgttgaagtgsaatattctgattatag

SEQ ID NO: 5992 - DNA, 33 bp, homo sapiens
tttttactgcaggtcawatttttcactcattta

SEQ ID NO: 5993 - DNA, 33 bp, homo sapiens
ttcagtcattcacagarctgtcattaactttgc

SEQ ID NO: 5994 - DNA, 33 bp, homo sapiens
ttctgacttcctgctcrccaagctaccttccga

SEQ ID NO: 5995 - DNA, 33 bp, homo sapiens
gccatagtcatgataamcttctctttgttgtca

SEQ ID NO: 5996 - DNA, 33 bp, homo sapiens
caactggtgaacagatragcaaaatgtgacaca

SEQ ID NO: 5997 - DNA, 33 bp, homo sapiens
acaggatagaagattcrgaagattttttagtat

SEQ ID NO: 5998 - DNA, 33 bp, homo sapiens
ggaagaaatattaaaastttgctctgaacatat

SEQ ID NO: 5999 - DNA, 33 bp, homo sapiens
agttttcactttatccygaacacaagggcatta

SEQ ID NO: 6000 - DNA, 33 bp, homo sapiens
ctgtatggaagaattcmaaataatttgtttagc

SEQ ID NO: 6001 - DNA, 33 bp, homo sapiens
catgaagggttctcaarctttaatatgcattca

SEQ ID NO: 6002 - DNA, 33 bp, homo sapiens
ctttatctgttgcaaartgtctacttataaatg

SEQ ID NO: 6003 - DNA, 33 bp, homo sapiens
ttttgcagatgaaaaastttagcttggtatagt

SEQ ID NO: 6004 - DNA, 33 bp, homo sapiens
gcccccagggacaaaayaagaagtcagatcaca

SEQ ID NO: 6005 - DNA, 33 bp, homo sapiens
catgtggtaaagaagcwgaccacatccaaccaa

SEQ ID NO: 6006 - DNA, 33 bp, homo sapiens
caaacttgttttgcaaytctctagtacagacaa

SEQ ID NO: 6007 - DNA, 33 bp, homo sapiens
tctctgacctacagtcrctaaatctgcaggcta

SEQ ID NO: 6008 - DNA, 33 bp, homo sapiens
cctgggaattgattcaytactgttcacatttgt

SEQ ID NO: 6009 - DNA, 33 bp, homo sapiens
tcctgagatgtggcaartgtcaaagctctgtct

SEQ ID NO: 6010 - DNA, 33 bp, homo sapiens
tcttaattcatttgaarataataactaactccc

SEQ ID NO: 6011 - DNA, 33 bp, homo sapiens
ccactgctattcattayggtaaatttcttggta

SEQ ID NO: 6012 - DNA, 33 bp, homo sapiens
atattttccctttaaawgaatttgtgctgactt

SEQ ID NO: 6013 - DNA, 33 bp, homo sapiens
ttaacttaatacaaacrcattgaatgcttccta

SEQ ID NO: 6014 - DNA, 33 bp, homo sapiens
agtgtttaacctattgmaattgaaattacccaa

SEQ ID NO: 6015 - DNA, 33 bp, homo sapiens
ttagaaatccatgcaartctcactaggctaaaa

SEQ ID NO: 6016 - DNA, 33 bp, homo sapiens
gagagaagcccaacaamtaatctatacatttat

SEQ ID NO: 6017 - DNA, 33 bp, homo sapiens
agtcaagtccctgaagyaaacatgcaggatcca

SEQ ID NO: 6018 - DNA, 33 bp, homo sapiens
ctttattcttgagcgartcacttggcagagcct

SEQ ID NO: 6019 - DNA, 33 bp, homo sapiens
taaataagaaaagttcrcaaaatcgcttaactt

SEQ ID NO: 6020 - DNA, 33 bp, homo sapiens
cgttgacgtcacaaagraaaacaaatgatagct

SEQ ID NO: 6021 - DNA, 33 bp, homo sapiens
acagcaaattttgaacrctggagacgtgacaca

SEQ ID NO: 6022 - DNA, 33 bp, homo sapiens
tatgcctagaatgtaaytagatattgttctaat

SEQ ID NO: 6023 - DNA, 33 bp, homo sapiens
acagtacatgaccaggmaggacttcacctctaa

SEQ ID NO: 6024 - DNA, 33 bp, homo sapiens
cttcagtgctatcccaygaagtctgaattttag

SEQ ID NO: 6025 - DNA, 33 bp, homo sapiens
ggcttgaggaataatgmaacgtgatctcaagac

SEQ ID NO: 6026 - DNA, 33 bp, homo sapiens
tctgaagtttctcagastctcgtaaatatctca

SEQ ID NO: 6027 - DNA, 33 bp, homo sapiens
ctatgcttccctgataraatagttcttaactta

SEQ ID NO: 6028 - DNA, 33 bp, homo sapiens
aggtaaaatccagtaarcgtgagtgaccactga

SEQ ID NO: 6029 - DNA, 33 bp, homo sapiens
cacctgaagagaggacratgtcaggtcgacaga

SEQ ID NO: 6030 - DNA, 33 bp, homo sapiens
atagaccctgcggcacrgctttaaaacagttag

SEQ ID NO: 6031 - DNA, 33 bp, homo sapiens
aggacaaaggctgaaaygaaagagtaacaggaa

SEQ ID NO: 6032 - DNA, 33 bp, homo sapiens
aaggagaatgatcttcragatttctgtaacttc

SEQ ID NO: 6033 - DNA, 33 bp, homo sapiens
agaaatggagaagcaaygctttttgttggtctt

SEQ ID NO: 6034 - DNA, 33 bp, homo sapiens
aaatcattttgacttaygcatgacttaaaattt

SEQ ID NO: 6035 - DNA, 33 bp, homo sapiens
gcaatagcataaagtcrgaaacatttttaaaag

SEQ ID NO: 6036 - DNA, 33 bp, homo sapiens
gggtataatgagggaamcttttactaatataaa

SEQ ID NO: 6037 - DNA, 33 bp, homo sapiens
gacactgaatttgttargacacttcctatgatg

SEQ ID NO: 6038 - DNA, 33 bp, homo sapiens
aacctcatatttctggratgggcaactgcgtga

SEQ ID NO: 6039 - DNA, 33 bp, homo sapiens
gaggcttcttttcatamctgaaatatctgaata

SEQ ID NO: 6040 - DNA, 33 bp, homo sapiens
tggtctaagcacctaayagcaatacttcacgaa

SEQ ID NO: 6041 - DNA, 33 bp, homo sapiens
tttttctaataagtaaytgttctttccgtggca

SEQ ID NO: 6042 - DNA, 33 bp, homo sapiens
cttctttcatttgtacrataccaccatgaagtc

SEQ ID NO: 6043 - DNA, 33 bp, homo sapiens
gaagaatgaacagccaygtagaaatgtcactgg

SEQ ID NO: 6044 - DNA, 33 bp, homo sapiens
ggtgtccttctcacctracaacaggaaaagcta

SEQ ID NO: 6045 - DNA, 33 bp, homo sapiens
gagggcttgatctatgrcagtgacagtgacaga

SEQ ID NO: 6046 - DNA, 33 bp, homo sapiens
cacatttcagaaatggkattaagacctgcactg

SEQ ID NO: 6047 - DNA, 33 bp, homo sapiens
attaacgcggcattcamggctctccaggtgcca

SEQ ID NO: 6048 - DNA, 33 bp, homo sapiens
tttactggagaagtaasagcagtgaatagagat

SEQ ID NO: 6049 - DNA, 33 bp, homo sapiens
attagagcaggaaatgsagggaggaactcatct

SEQ ID NO: 6050 - DNA, 33 bp, homo sapiens
ttctacctaatcatccygctagaatgtactcac

SEQ ID NO: 6051 - DNA, 33 bp, homo sapiens
tcaaatgtaaagtcatwaagtggctgatggatt

SEQ ID NO: 6052 - DNA, 33 bp, homo sapiens
ggaaggtagtagacatkaaaatctaaagatact

SEQ ID NO: 6053 - DNA, 33 bp, homo sapiens
taaaactgctgtatccraattatcaggaaatat

SEQ ID NO: 6054 - DNA, 33 bp, homo sapiens
aaggcagaaggatacamattggcaaggcatgat

SEQ ID NO: 6055 - DNA, 33 bp, homo sapiens
gaaacttcaggcgaaartgctgaaggagcaaga

SEQ ID NO: 6056 - DNA, 33 bp, homo sapiens
acattgtagtcagcaarcacatatttcttaaca

SEQ ID NO: 6057 - DNA, 33 bp, homo sapiens
tgcttaaaacaccacayctcatctaggagtaca

SEQ ID NO: 6058 - DNA, 33 bp, homo sapiens
gcgtatacaggcaatcrctttgcttcactggat

SEQ ID NO: 6059 - DNA, 33 bp, homo sapiens
tcataaaaatttgaagyctgctttaccgtagca

SEQ ID NO: 6060 - DNA, 33 bp, homo sapiens
aagcccatcataaaacygtggtctggtcaagct

SEQ ID NO: 6061 - DNA, 33 bp, homo sapiens
ggacagcagtctgcaargtcaggtgtgttttag

SEQ ID NO: 6062 - DNA, 33 bp, homo sapiens
tgctgtctccatctaarataatacagatcaccc

SEQ ID NO: 6063 - DNA, 33 bp, homo sapiens
acagctcttacctacartcttttcaggtacttg

SEQ ID NO: 6064 - DNA, 33 bp, homo sapiens
ggcatagacttcatcarggaagattaaaggact

SEQ ID NO: 6065 - DNA, 33 bp, homo sapiens
gatccatagacaaagcmaatcaagttcaggctc

SEQ ID NO: 6066 - DNA, 33 bp, homo sapiens
tagaaaaacacagaaaraaggaagtagacagtg

SEQ ID NO: 6067 - DNA, 33 bp, homo sapiens
ttggcccttgaagaaayttcactgaacctggat

SEQ ID NO: 6068 - DNA, 33 bp, homo sapiens
tgtgagtgagtctgtayacttgcttaaactggt

SEQ ID NO: 6069 - DNA, 33 bp, homo sapiens
ttgtgatgaacacagamgtgcaggggtcttttt

SEQ ID NO: 6070 - DNA, 33 bp, homo sapiens
actgtgttaattattaygatgcttactatatcg

SEQ ID NO: 6071 - DNA, 33 bp, homo sapiens
taaaggtagcaacatasaggaatttttctgagg

SEQ ID NO: 6072 - DNA, 33 bp, homo sapiens
cttagttcatattcagrcctcaaaacatacttg

SEQ ID NO: 6073 - DNA, 33 bp, homo sapiens
ttaggaatgaatcctakaaactgattgtcctct

SEQ ID NO: 6074 - DNA, 33 bp, homo sapiens
ccaggagaccacaaacragtacttttgagatag

SEQ ID NO: 6075 - DNA, 33 bp, homo sapiens
tgatcaatgttttataycaccattttattggtt

SEQ ID NO: 6076 - DNA, 33 bp, homo sapiens
tatgttctatcctccarccttaaccaatacacc

SEQ ID NO: 6077 - DNA, 33 bp, homo sapiens
catgatctcttggtctkactatctataattttg

SEQ ID NO: 6078 - DNA, 33 bp, homo sapiens
gatgaacgcttagtaawtaataaggcaaagtga

SEQ ID NO: 6079 - DNA, 33 bp, homo sapiens
gggctacaatggtaagyaaaaacagatcagatc

SEQ ID NO: 6080 - DNA, 33 bp, homo sapiens
tgtgcggcagaacacartaaggttcatatccat

SEQ ID NO: 6081 - DNA, 33 bp, homo sapiens
cacacagtacttggcasataatcagtgctcatt

SEQ ID NO: 6082 - DNA, 33 bp, homo sapiens
tttttgaaaatttcaaraaggcctgcagatact

SEQ ID NO: 6083 - DNA, 33 bp, homo sapiens
ctctgtcagacgaagargaatttgagattcagg

SEQ ID NO: 6084 - DNA, 33 bp, homo sapiens
atccatccagtagataygtattttgaaggaaaa

SEQ ID NO: 6085 - DNA, 33 bp, homo sapiens
ttcttaagctctagaaytatcctggtctttatc

SEQ ID NO: 6086 - DNA, 33 bp, homo sapiens
ccaaaaaatcagacaamtagcctttacccagtg

SEQ ID NO: 6087 - DNA, 33 bp, homo sapiens
gtgtctccccagaattmaagtgttggagccctg

SEQ ID NO: 6088 - DNA, 33 bp, homo sapiens
taagctacttttcacasccttgtttgtcatcca

SEQ ID NO: 6089 - DNA, 33 bp, homo sapiens
aaatccaaccagatccrcagggaagggatgtgg

SEQ ID NO: 6090 - DNA, 33 bp, homo sapiens
attttgagttgcttgcraaacttgaggtttacc

SEQ ID NO: 6091 - DNA, 33 bp, homo sapiens
tcctatgggcatcaaaytagacctccccatcta

SEQ ID NO: 6092 - DNA, 33 bp, homo sapiens
cactgaattaaactctsaagttggacactagtc

SEQ ID NO: 6093 - DNA, 33 bp, homo sapiens
ttgtatgtcactccatsatgaagggtgctggtg

SEQ ID NO: 6094 - DNA, 33 bp, homo sapiens
ccatgatgccattgtarctgagaagggactacg

SEQ ID NO: 6095 - DNA, 33 bp, homo sapiens
taacaatagctaataakaaaatcgaacaatgat

SEQ ID NO: 6096 - DNA, 33 bp, homo sapiens
ttcccattataaccacrataaaattcaaatgct

SEQ ID NO: 6097 - DNA, 33 bp, homo sapiens
actattggaaatgatcyatgagctatactgggc

SEQ ID NO: 6098 - DNA, 33 bp, homo sapiens
tatataatagtgttgayagcagtgtggttgtga

SEQ ID NO: 6099 - DNA, 33 bp, homo sapiens
tagtctattgtagttamaacagaaaatggaccc

SEQ ID NO: 6100 - DNA, 33 bp, homo sapiens
tcaaagttcgatgaatraagactctcatcttac

SEQ ID NO: 6101 - DNA, 33 bp, homo sapiens
atcatcatctaaatcayatctgcacgctaatta

SEQ ID NO: 6102 - DNA, 33 bp, homo sapiens
cggttaatatggtcaaytcagatggttaaatgt

SEQ ID NO: 6103 - DNA, 33 bp, homo sapiens
atgatctgtaataatcycaaagggctcatttca

SEQ ID NO: 6104 - DNA, 33 bp, homo sapiens
gcattaactcagcccaytcttgagcataaaaga

SEQ ID NO: 6105 - DNA, 33 bp, homo sapiens
tgtatgtctctcactcwgaaataatcatgccac

SEQ ID NO: 6106 - DNA, 33 bp, homo sapiens
tagccagagaaaataaytggatgcacatagagt

SEQ ID NO: 6107 - DNA, 33 bp, homo sapiens
agagaaattttccttarataaagctactccctt

SEQ ID NO: 6108 - DNA, 33 bp, homo sapiens
gttcctggcagctgtgragggcttagcttaggg

SEQ ID NO: 6109 - DNA, 33 bp, homo sapiens
gtataagtaatttgggsaatgctatataataaa

SEQ ID NO: 6110 - DNA, 33 bp, homo sapiens
aagaaactagcaacacrgtaaacagacagcgtg

SEQ ID NO: 6111 - DNA, 33 bp, homo sapiens
tgcaaatttccttaaayggcacaataattatgc

SEQ ID NO: 6112 - DNA, 33 bp, homo sapiens
agaacttgataaaatgyaggttcccaggcctca

SEQ ID NO: 6113 - DNA, 33 bp, homo sapiens
gaactcaggtgtgtaawccgaaagtaaaatctt

SEQ ID NO: 6114 - DNA, 33 bp, homo sapiens
ccatgattgagttcccsctcagtccaggtgatg

SEQ ID NO: 6115 - DNA, 33 bp, homo sapiens
ggtgatgagcacagacsaaaacatcttaaggca

SEQ ID NO: 6116 - DNA, 33 bp, homo sapiens
aagttacactgtagaaytgttcgccagtcttct

SEQ ID NO: 6117 - DNA, 33 bp, homo sapiens
caggaaagtcttagtcrcgccctatctgcagag

SEQ ID NO: 6118 - DNA, 33 bp, homo sapiens
tgcctggctatttggcygaaaaataacaacatg

SEQ ID NO: 6119 - DNA, 33 bp, homo sapiens
ttgaaagcgaaaaatastatttcaacatgtaaa

SEQ ID NO: 6120 - DNA, 33 bp, homo sapiens
gacccagtacatcctamaggtaaatcactgcat

SEQ ID NO: 6121 - DNA, 33 bp, homo sapiens
aactgacttctcattaygtgagttgaataaaga

SEQ ID NO: 6122 - DNA, 33 bp, homo sapiens
caagctggaggaaaacrgattatacaggaaaag

SEQ ID NO: 6123 - DNA, 33 bp, homo sapiens
atgtaagaaaggaataracgtgtcactttcaag

SEQ ID NO: 6124 - DNA, 33 bp, homo sapiens
aaggtcgacagaggacrgacaaagactaggtca

SEQ ID NO: 6125 - DNA, 33 bp, homo sapiens
tgtctggtataaataamtactgggctgagaggg

SEQ ID NO: 6126 - DNA, 33 bp, homo sapiens
gttgtgagcagagagartcctgaagagagctga

SEQ ID NO: 6127 - DNA, 33 bp, homo sapiens
tgatcacaactttttamatcaatatatccacgt

SEQ ID NO: 6128 - DNA, 33 bp, homo sapiens
acacaacctttagtgayctttggagctctgaaa

SEQ ID NO: 6129 - DNA, 33 bp, homo sapiens
cagaaaggctttgcacygaaacatgaccactca

SEQ ID NO: 6130 - DNA, 33 bp, homo sapiens
aagtgaactaccacacragtcagctagagataa

SEQ ID NO: 6131 - DNA, 33 bp, homo sapiens
ctcatacaggatcttcyaagttgtcccatttgg

SEQ ID NO: 6132 - DNA, 33 bp, homo sapiens
ttaagtgctgaggatamaaaggccaagatcagt

SEQ ID NO: 6133 - DNA, 33 bp, homo sapiens
aaatcatctcctgggamctttttttgatatgcc

SEQ ID NO: 6134 - DNA, 33 bp, homo sapiens
tatttaaacaacagaaytctagataggttggaa

SEQ ID NO: 6135 - DNA, 33 bp, homo sapiens
atctcccacttgtttgyaccctgatatctagga

SEQ ID NO: 6136 - DNA, 33 bp, homo sapiens
acagcgccctcctggaygttactctgctgagac

SEQ ID NO: 6137 - DNA, 33 bp, homo sapiens
cagcggcaggttagaayctaagctcatcttact

SEQ ID NO: 6138 - DNA, 33 bp, homo sapiens
cagctaaagtgctgaargtcagagaagtcaaga

SEQ ID NO: 6139 - DNA, 33 bp, homo sapiens
gaatgcatcaatgcaasttagctacctcactag

SEQ ID NO: 6140 - DNA, 33 bp, homo sapiens
agaactagagacactaraagtcgagagccacct

SEQ ID NO: 6141 - DNA, 33 bp, homo sapiens
ggaaggccagataaaasataccaaatccaccag

SEQ ID NO: 6142 - DNA, 33 bp, homo sapiens
tgagaagggactgataycacctactagtaaata

SEQ ID NO: 6143 - DNA, 33 bp, homo sapiens
tcaccacacttgaataygtctctgataagttta

SEQ ID NO: 6144 - DNA, 33 bp, homo sapiens
ccttctaatggagctcrgacgagagtgattgta

SEQ ID NO: 6145 - DNA, 33 bp, homo sapiens
tattaagcttgtcatastaaacttcttttttgt

SEQ ID NO: 6146 - DNA, 33 bp, homo sapiens
ccatctattgtctctcyattcacttgatgtttt

SEQ ID NO: 6147 - DNA, 33 bp, homo sapiens
gaacaaatattgacaasttggtagcagcataag

SEQ ID NO: 6148 - DNA, 33 bp, homo sapiens
tttgttatttgtaacastctctttcatttttat

SEQ ID NO: 6149 - DNA, 33 bp, homo sapiens
tagcatttcatccagaygttttgaatacttact

SEQ ID NO: 6150 - DNA, 33 bp, homo sapiens
acaaaagtggttagacmgtagaccacttagagt

SEQ ID NO: 6151 - DNA, 33 bp, homo sapiens
gcatttttttcttcaartgcaatggcccctggt

SEQ ID NO: 6152 - DNA, 33 bp, homo sapiens
ctctgaacggtccctasggtttgcattgttatc

SEQ ID NO: 6153 - DNA, 33 bp, homo sapiens
caagtggctgttaacamactagaatgaaatatc

SEQ ID NO: 6154 - DNA, 33 bp, homo sapiens
caaggtccctcctagastatgattctgttcctt

SEQ ID NO: 6155 - DNA, 33 bp, homo sapiens
cttaacatttctcttcwatcatactctttgctc

SEQ ID NO: 6156 - DNA, 33 bp, homo sapiens
tgctgaaacgtgttggkcactcgatactcgagc

SEQ ID NO: 6157 - DNA, 33 bp, homo sapiens
agccttctctaggccartcatcagtgtcacagc

SEQ ID NO: 6158 - DNA, 33 bp, homo sapiens
ggtccttgtggtcaacraaagcgataggctgcg

SEQ ID NO: 6159 - DNA, 33 bp, homo sapiens
atgtggatgtttacagrataaatcaatctctct

SEQ ID NO: 6160 - DNA, 33 bp, homo sapiens
agcccttgtggggaaayggatatgatataatca

SEQ ID NO: 6161 - DNA, 33 bp, homo sapiens
tgctgggtttttataaygaaaatgtgcacatta

SEQ ID NO: 6162 - DNA, 33 bp, homo sapiens
aagcaggagactgagakaatttcatgttttcaa

SEQ ID NO: 6163 - DNA, 33 bp, homo sapiens
tcccctgttgaagataycagctatggtccccca

SEQ ID NO: 6164 - DNA, 33 bp, homo sapiens
ctttcctacttataatyagtggtactgaggcag

SEQ ID NO: 6165 - DNA, 33 bp, homo sapiens
ttaggtgtttccttgcyaaattaagccacttca

SEQ ID NO: 6166 - DNA, 33 bp, homo sapiens
ttgccagggtaggcaasttaggatacaaagcac

SEQ ID NO: 6167 - DNA, 33 bp, homo sapiens
agtgcagaggaaacgargatagtcaatagcaca

SEQ ID NO: 6168 - DNA, 33 bp, homo sapiens
ccgtgtgttttacaagkaccttgtctgtcacgt

SEQ ID NO: 6169 - DNA, 33 bp, homo sapiens
ctgatgtatttatggakgagtaatgtaacctca

SEQ ID NO: 6170 - DNA, 33 bp, homo sapiens
acacctagaaccctgawgaacttcatcccaaaa

SEQ ID NO: 6171 - DNA, 33 bp, homo sapiens
ttacctcacctatcaaygagacttcagttctgg

SEQ ID NO: 6172 - DNA, 33 bp, homo sapiens
gaaccacagtataatayggcagcacgatcaata

SEQ ID NO: 6173 - DNA, 33 bp, homo sapiens
tatctgagttaagatamggggtccaggagatct

SEQ ID NO: 6174 - DNA, 33 bp, homo sapiens
agcatgcgtacttaatmaagttttgggaatttc

SEQ ID NO: 6175 - DNA, 33 bp, homo sapiens
gaagagaatccagagartagtgccccggaacct

SEQ ID NO: 6176 - DNA, 33 bp, homo sapiens
ctccatttacaccctayggcatacacccagtaa

SEQ ID NO: 6177 - DNA, 33 bp, homo sapiens
ttaagtgcatttgatasatttaatggtgtccca

SEQ ID NO: 6178 - DNA, 33 bp, homo sapiens
aggatgaatactcaaayatacaaaacagcaaaa

SEQ ID NO: 6179 - DNA, 33 bp, homo sapiens
tgaattttaacacagargcttattccagtttaa

SEQ ID NO: 6180 - DNA, 33 bp, homo sapiens
cttgttaaggcttgtarattctccatataaatt

SEQ ID NO: 6181 - DNA, 33 bp, homo sapiens
aatacaagtaagacgcygagggcttgatgaggt

SEQ ID NO: 6182 - DNA, 33 bp, homo sapiens
tcccagctcctcctccsaaagctctcaagttag

SEQ ID NO: 6183 - DNA, 33 bp, homo sapiens
agctctttcaatattgscaaatagacttaaaaa

SEQ ID NO: 6184 - DNA, 33 bp, homo sapiens
cttaaccaatctattgmatttttgtctaaaggt

SEQ ID NO: 6185 - DNA, 33 bp, homo sapiens
gtgaaagtactcacaakttggagtgatcacagc

SEQ ID NO: 6186 - DNA, 33 bp, homo sapiens
gaacggctctctgtcaygccaggtcttcttttt

SEQ ID NO: 6187 - DNA, 33 bp, homo sapiens
atatacaggctccagartatagaacatacagct

SEQ ID NO: 6188 - DNA, 33 bp, homo sapiens
gcacaacagccctgacraattgcatagcgcacc

SEQ ID NO: 6189 - DNA, 33 bp, homo sapiens
gccatgaagttgagacyggtgacctgatgggag

SEQ ID NO: 6190 - DNA, 33 bp, homo sapiens
acatcttctgccaacaytgacatgaagatcagc

SEQ ID NO: 6191 - DNA, 33 bp, homo sapiens
tacccattcctctgccratgcacacgtcggttg

SEQ ID NO: 6192 - DNA, 33 bp, homo sapiens
ccaggcacaagggatayggcagtgactaaaaca

SEQ ID NO: 6193 - DNA, 33 bp, homo sapiens
atggcagtaacccctcmgaaatatgaagtgatg

SEQ ID NO: 6194 - DNA, 33 bp, homo sapiens
tagggggccatctgtakgccgttgaggagggcc

SEQ ID NO: 6195 - DNA, 33 bp, homo sapiens
acaggttttatttccasacattacaattttaaa

SEQ ID NO: 6196 - DNA, 33 bp, homo sapiens
ggaaatgtaagtataaygacaggtttcagggga

SEQ ID NO: 6197 - DNA, 33 bp, homo sapiens
tgcaatgatgaaaaaamagttcaccacagcctc

SEQ ID NO: 6198 - DNA, 33 bp, homo sapiens
gtttacctgtgtaaaartgtgcagggtaaggag

SEQ ID NO: 6199 - DNA, 33 bp, homo sapiens
ggtttggcatcagagcraaggcagaactggcac

SEQ ID NO: 6200 - DNA, 33 bp, homo sapiens
aggattgctgaagctamctgccagatgatgcag

SEQ ID NO: 6201 - DNA, 33 bp, homo sapiens
agcagaagaatgtggarattaaatgacagcaac

SEQ ID NO: 6202 - DNA, 33 bp, homo sapiens
cagttcactagttttaragatgggactcctccc

SEQ ID NO: 6203 - DNA, 33 bp, homo sapiens
ttctcacaggagctcamatcctcttgtgaactg

SEQ ID NO: 6204 - DNA, 33 bp, homo sapiens
gtgatgtggactaaacrgaaagacagaatgccg

SEQ ID NO: 6205 - DNA, 33 bp, homo sapiens
gggggaagaggagaccraatgtatgggggactg

SEQ ID NO: 6206 - DNA, 33 bp, homo sapiens
tttccttttttctgaartgttcttctcagcttg

SEQ ID NO: 6207 - DNA, 33 bp, homo sapiens
actcaaattcagcaacraggaaaaaataggtta

SEQ ID NO: 6208 - DNA, 33 bp, homo sapiens
accaagttctgtggtcyacatactttatgaaag

SEQ ID NO: 6209 - DNA, 33 bp, homo sapiens
agggaggcagttgatcratttagagcaagcact

SEQ ID NO: 6210 - DNA, 33 bp, homo sapiens
gaaggccaactgtgcayctggcagagacacacg

SEQ ID NO: 6211 - DNA, 33 bp, homo sapiens
gtcctgacaccactccscgcagtaagttctctg

SEQ ID NO: 6212 - DNA, 33 bp, homo sapiens
tctgtcttgcaagaacrgcttaatttctcccac

SEQ ID NO: 6213 - DNA, 33 bp, homo sapiens
cattgcacggtgtgttyaaaatgtccgcagcta

SEQ ID NO: 6214 - DNA, 33 bp, homo sapiens
agggaaaggtgaggccracgacactgggcctac

SEQ ID NO: 6215 - DNA, 33 bp, homo sapiens
cttgcctggagaacaartgaacgctgcacgtga

SEQ ID NO: 6216 - DNA, 33 bp, homo sapiens
aacggtgcctttgcagsagatcccattgttcat

SEQ ID NO: 6217 - DNA, 33 bp, homo sapiens
ctgatctcacagggtcyaaggtccaggagtggg

SEQ ID NO: 6218 - DNA, 33 bp, homo sapiens
acaaagtgtcaatcaaygttttcttcaataatg

SEQ ID NO: 6219 - DNA, 33 bp, homo sapiens
aagaggcaacggcatcrgacgctaggaagacct

SEQ ID NO: 6220 - DNA, 33 bp, homo sapiens
agaactctcctaaaacsacatctgctgatggaa

SEQ ID NO: 6221 - DNA, 33 bp, homo sapiens
ggggacctctgtgaaayaggaaaatgagtgcct

SEQ ID NO: 6222 - DNA, 33 bp, homo sapiens
taattacagattcacakgaagttacacagatag

SEQ ID NO: 6223 - DNA, 33 bp, homo sapiens
tgaaaaagaaagtcccmagcgctgtaaagcaca

SEQ ID NO: 6224 - DNA, 33 bp, homo sapiens
tgggcaggtggaagacratgggtcaaggataag

SEQ ID NO: 6225 - DNA, 33 bp, homo sapiens
gaagggatggacaaagraagaccaccagtggat

SEQ ID NO: 6226 - DNA, 33 bp, homo sapiens
catctagagtcaagtcrgaacagattagagcaa

SEQ ID NO: 6227 - DNA, 33 bp, homo sapiens
gaatcagtggccataargagctttgcgaagcag

SEQ ID NO: 6228 - DNA, 33 bp, homo sapiens
gccagattggaaagaakgaagtgcagatcaatc

SEQ ID NO: 6229 - DNA, 33 bp, homo sapiens
acgatctatagaataastaaccaaagctcaagt

SEQ ID NO: 6230 - DNA, 33 bp, homo sapiens
aatctagaaaggcaacmaatatatcatagcata

SEQ ID NO: 6231 - DNA, 33 bp, homo sapiens
acaaattcttcaacacmcaacctatctgcagaa

SEQ ID NO: 6232 - DNA, 33 bp, homo sapiens
cactgtatccagaagcrgcatgattaatttgat

SEQ ID NO: 6233 - DNA, 33 bp, homo sapiens
aggcaagtgagagaacraagaagctggaagtgt

SEQ ID NO: 6234 - DNA, 33 bp, homo sapiens
gatggatgcgttctgcracttcgggatggccag

SEQ ID NO: 6235 - DNA, 33 bp, homo sapiens
agcttctctgcaagcartgctcttgatcactct

SEQ ID NO: 6236 - DNA, 33 bp, homo sapiens
gttcacagcagcctcartcataatccaagtgtt

SEQ ID NO: 6237 - DNA, 33 bp, homo sapiens
tcaattgaaactgaacycttaaaaatgatttgt

SEQ ID NO: 6238 - DNA, 33 bp, homo sapiens
tccagacatgatcaaasagtgccagcgaaacaa

SEQ ID NO: 6239 - DNA, 33 bp, homo sapiens
ctggggactcgagggaygatctggctgtcacca

SEQ ID NO: 6240 - DNA, 33 bp, homo sapiens
ccagggtgaccaggtaragcggcaagaagagga

SEQ ID NO: 6241 - DNA, 33 bp, homo sapiens
agtgccaaagttagcarctcaggagatgtggct

SEQ ID NO: 6242 - DNA, 33 bp, homo sapiens
ttttaagttgaagttascacctattatgtgcct

SEQ ID NO: 6243 - DNA, 33 bp, homo sapiens
ctactgttcactagcasgtggcccgagtcagct

SEQ ID NO: 6244 - DNA, 33 bp, homo sapiens
tgacttttgagcagaamcctgagtgttattaga

SEQ ID NO: 6245 - DNA, 33 bp, homo sapiens
gtgaaccaagttgcagrcctcttcctgcaagca

SEQ ID NO: 6246 - DNA, 33 bp, homo sapiens
acccacattccttggckcatagttcctctattt

SEQ ID NO: 6247 - DNA, 33 bp, homo sapiens
agtaaaaggcattaggyacctggagagcactgc

SEQ ID NO: 6248 - DNA, 33 bp, homo sapiens
aaaggaatccctcctcrgaaaatcagggtaatg

SEQ ID NO: 6249 - DNA, 33 bp, homo sapiens
tttctagcagttcttascactggcattaataag

SEQ ID NO: 6250 - DNA, 33 bp, homo sapiens
tttgattggatcattcycttgttttaaagctgg

SEQ ID NO: 6251 - DNA, 33 bp, homo sapiens
gagtgcccaattctccygaatcatcgttgagat

SEQ ID NO: 6252 - DNA, 33 bp, homo sapiens
tctatcttctaaaatakagcaaaattgcctttt

SEQ ID NO: 6253 - DNA, 33 bp, homo sapiens
ggaacacctgagtaacwatctgactgctttctc

SEQ ID NO: 6254 - DNA, 33 bp, homo sapiens
tggagagactaagtgamatgctccaaatcccac

SEQ ID NO: 6255 - DNA, 33 bp, homo sapiens
tccctgcgcttacatayaactcaagattcagga

SEQ ID NO: 6256 - DNA, 33 bp, homo sapiens
tcgtatccttttctgaratgttcaagcactgtc

SEQ ID NO: 6257 - DNA, 33 bp, homo sapiens
gagttagaataagtcarcttttccagcaatcag

SEQ ID NO: 6258 - DNA, 33 bp, homo sapiens
ctgggccagaatgcacygtccttcaaggcacat

SEQ ID NO: 6259 - DNA, 33 bp, homo sapiens
atctgaactagctccaygtacttaattgctttc

SEQ ID NO: 6260 - DNA, 33 bp, homo sapiens
tctttaaaccagttaakaaacatctgctaagtc

SEQ ID NO: 6261 - DNA, 33 bp, homo sapiens
acaaatcaattttttayagtacaaacttcttag

SEQ ID NO: 6262 - DNA, 33 bp, homo sapiens
cagtcctttaatgctayattttaaatcgcttta

SEQ ID NO: 6263 - DNA, 33 bp, homo sapiens
acaaagacaccaataaygcacaatgggaaaatt

SEQ ID NO: 6264 - DNA, 33 bp, homo sapiens
gaggtgtctgtttagakctttcacctattttta

SEQ ID NO: 6265 - DNA, 33 bp, homo sapiens
aacattagagacaaaargatggctaaagtaata

SEQ ID NO: 6266 - DNA, 33 bp, homo sapiens
ctttaacttctaacaaygggagactcaattgtg

SEQ ID NO: 6267 - DNA, 33 bp, homo sapiens
tctatggccacgatcckaccttaggtgcaaggc

SEQ ID NO: 6268 - DNA, 33 bp, homo sapiens
taaaccagctctagccrgaggggaattgcagat

SEQ ID NO: 6269 - DNA, 33 bp, homo sapiens
atggtaaatattgagcyaaacctttggtgtatg

SEQ ID NO: 6270 - DNA, 33 bp, homo sapiens
cagggagaaaaactaargtgagaagaaagttga

SEQ ID NO: 6271 - DNA, 33 bp, homo sapiens
caaaatataaagtgaakggtaacctatcagtct

SEQ ID NO: 6272 - DNA, 33 bp, homo sapiens
atttatacatgaaggasaatcagtctaccataa

SEQ ID NO: 6273 - DNA, 33 bp, homo sapiens
caaaagcagtgctccaygaagattgccacctct

SEQ ID NO: 6274 - DNA, 33 bp, homo sapiens
ttcctccctcattcccrgaagaacagaatacta

SEQ ID NO: 6275 - DNA, 33 bp, homo sapiens
aaaagacaatacctcaygaacttggagtagaaa

SEQ ID NO: 6276 - DNA, 33 bp, homo sapiens
taattgaagagttaacratgactttctcagaaa

SEQ ID NO: 6277 - DNA, 33 bp, homo sapiens
ggtatattgagtgaaaytaaggtgtgaggtaca

SEQ ID NO: 6278 - DNA, 33 bp, homo sapiens
ggaggccatgccagaaygaaatatcaagcagaa

SEQ ID NO: 6279 - DNA, 33 bp, homo sapiens
aaggtagtaagggacgkaatcagtggggatggt

SEQ ID NO: 6280 - DNA, 33 bp, homo sapiens
aagcagttactctttgraggctaaatgatgtta

SEQ ID NO: 6281 - DNA, 33 bp, homo sapiens
tgatagacaagcctcargtgctacacattcatt

SEQ ID NO: 6282 - DNA, 33 bp, homo sapiens
tcactgcagccacaatraaatttgaaacaggag

SEQ ID NO: 6283 - DNA, 33 bp, homo sapiens
tgaaactataagttccmgaaaggcagtattaga

SEQ ID NO: 6284 - DNA, 33 bp, homo sapiens
tacagcctgctaaagargaatagtggacatgat

SEQ ID NO: 6285 - DNA, 33 bp, homo sapiens
ttctcccaagcaaacayagttggaattgcccat

SEQ ID NO: 6286 - DNA, 33 bp, homo sapiens
ttggaattgcagatgaygggttatagagtttaa

SEQ ID NO: 6287 - DNA, 33 bp, homo sapiens
tcatactagtgcgagaygaaaaacaaaacacaa

SEQ ID NO: 6288 - DNA, 33 bp, homo sapiens
ttctgatgcagcccccrcaatggaggctctcat

SEQ ID NO: 6289 - DNA, 33 bp, homo sapiens
aaccacaagctgataarggacaaataaacacta

SEQ ID NO: 6290 - DNA, 33 bp, homo sapiens
tagagttggactatcayagattagaaaaatact

SEQ ID NO: 6291 - DNA, 33 bp, homo sapiens
aaacatcccaactccaytgagcctgtggaagga

SEQ ID NO: 6292 - DNA, 33 bp, homo sapiens
tctttaatatagaagcmctcacagctttttggt

SEQ ID NO: 6293 - DNA, 33 bp, homo sapiens
tattatgttaaactgamgccaaaggtaagttgt

SEQ ID NO: 6294 - DNA, 33 bp, homo sapiens
tttaaatgtgcaaaaamgtcccacttatataag

SEQ ID NO: 6295 - DNA, 33 bp, homo sapiens
gtggttgacaagtcacygataagagtgaaagtc

SEQ ID NO: 6296 - DNA, 33 bp, homo sapiens
agttcaagcctacaaayatagacaagagctaaa

SEQ ID NO: 6297 - DNA, 33 bp, homo sapiens
gcctcctcttactctaygacccttggttctgtt

SEQ ID NO: 6298 - DNA, 33 bp, homo sapiens
agagaacacgagggaawcattttaaaatagcaa

SEQ ID NO: 6299 - DNA, 33 bp, homo sapiens
tctcacatgagtgtcaytcactaaacttctcgt

SEQ ID NO: 6300 - DNA, 33 bp, homo sapiens
tttgtgtttgatcagargctgttcttaagcctg

SEQ ID NO: 6301 - DNA, 33 bp, homo sapiens
attatttgctggtaaayggtctcttttatgaca

SEQ ID NO: 6302 - DNA, 33 bp, homo sapiens
caatgctacaaacatcygaatagcacatttttt

SEQ ID NO: 6303 - DNA, 33 bp, homo sapiens
aatgttgatgtgatgtmaaatgcattagcagag

SEQ ID NO: 6304 - DNA, 33 bp, homo sapiens
gcatataacaatctcaraacaagtttacactaa

SEQ ID NO: 6305 - DNA, 33 bp, homo sapiens
ggaaaatatgctccacycttaaaagtatgctaa

SEQ ID NO: 6306 - DNA, 33 bp, homo sapiens
tgtagtaatgagacacwggaaatagcttaaaaa

SEQ ID NO: 6307 - DNA, 33 bp, homo sapiens
atttaacctctttggakgcttcatctaatttac

SEQ ID NO: 6308 - DNA, 33 bp, homo sapiens
taggtttcttgagaackgagatgatttcttatt

SEQ ID NO: 6309 - DNA, 33 bp, homo sapiens
aaaaggcattttacaasaaagaccattgcccag

SEQ ID NO: 6310 - DNA, 33 bp, homo sapiens
atggtcttcaggaacamtgttatacttcttcag

SEQ ID NO: 6311 - DNA, 33 bp, homo sapiens
cctaaataagacatacsatattcatgaattaga

SEQ ID NO: 6312 - DNA, 33 bp, homo sapiens
ctgaaactgagtgtgcraggttttaaaaatcct

SEQ ID NO: 6313 - DNA, 33 bp, homo sapiens
ttaaaagaaaaccacartgagtggaagagagat

SEQ ID NO: 6314 - DNA, 33 bp, homo sapiens
atttcaaatgttttgayagtccaaaaagctaga

SEQ ID NO: 6315 - DNA, 33 bp, homo sapiens
gtattagaagtgtagaraaaatgtgaggaagta

SEQ ID NO: 6316 - DNA, 33 bp, homo sapiens
ctactgatttccagagkaattaagcgatattgg

SEQ ID NO: 6317 - DNA, 33 bp, homo sapiens
aaagcatggatcataayagtttctatttcatag

SEQ ID NO: 6318 - DNA, 33 bp, homo sapiens
attcagaatttcagaamggaagaaaagccccat

SEQ ID NO: 6319 - DNA, 33 bp, homo sapiens
tgcataaacatgagackgagaggtaccttaaaa

SEQ ID NO: 6320 - DNA, 33 bp, homo sapiens
ggattagctaactatamaatctgacttagaaaa

SEQ ID NO: 6321 - DNA, 33 bp, homo sapiens
acttttgaatgttcctsaaattatgcttcataa

SEQ ID NO: 6322 - DNA, 33 bp, homo sapiens
agtattgtctcttcgawcctcatgaatacatta

SEQ ID NO: 6323 - DNA, 33 bp, homo sapiens
gtcttgaaccccaccamattctctatccattgc

SEQ ID NO: 6324 - DNA, 33 bp, homo sapiens
gggttttgaggtgaaakaaatagaaatttgtag

SEQ ID NO: 6325 - DNA, 33 bp, homo sapiens
tgaacccaggcaggaascaactccggacacatt

SEQ ID NO: 6326 - DNA, 33 bp, homo sapiens
aagaaggatgaagttayaaaagttaggctgcta

SEQ ID NO: 6327 - DNA, 33 bp, homo sapiens
tgatgaaggcatccccmgctttagctcactatg

SEQ ID NO: 6328 - DNA, 33 bp, homo sapiens
tcaaaagattaaatgasacaactgtttgctaga

SEQ ID NO: 6329 - DNA, 33 bp, homo sapiens
gctaagaattgtgttamataaaattgttaaaag

SEQ ID NO: 6330 - DNA, 33 bp, homo sapiens
aatatgggtaaaccttraaaccatgctgagtaa

SEQ ID NO: 6331 - DNA, 33 bp, homo sapiens
acatcacaattgaggamtggaggaactgcttac

SEQ ID NO: 6332 - DNA, 33 bp, homo sapiens
tcatgtttatttcaaartggcttgaagagaaga

SEQ ID NO: 6333 - DNA, 33 bp, homo sapiens
ctggaatccgttcccaygaggagattacaatat

SEQ ID NO: 6334 - DNA, 33 bp, homo sapiens
ttttctaccctggaacwaatttccacggaggtt

SEQ ID NO: 6335 - DNA, 33 bp, homo sapiens
aactcttacgttttaaytctctagactatgtaa

SEQ ID NO: 6336 - DNA, 33 bp, homo sapiens
ttgtgttaccagaaaargagaaatgatagaaaa

SEQ ID NO: 6337 - DNA, 33 bp, homo sapiens
acacttgactatcaaaytgagtatcacaagtct

SEQ ID NO: 6338 - DNA, 33 bp, homo sapiens
tagtgcatattatacartccctttatagtttcc

SEQ ID NO: 6339 - DNA, 33 bp, homo sapiens
gcatagcaaaaagagasgtatctttcttgttct

SEQ ID NO: 6340 - DNA, 33 bp, homo sapiens
aaaaaaatcaattcaargtgtatgcctatttga

SEQ ID NO: 6341 - DNA, 33 bp, homo sapiens
catggggacgtggctayatgaaaaggacagcag

SEQ ID NO: 6342 - DNA, 33 bp, homo sapiens
attcaacccaaaaaagycacaagcaaagacact

SEQ ID NO: 6343 - DNA, 33 bp, homo sapiens
ttggcaacgggctttaygagaaaatgtcatgga

SEQ ID NO: 6344 - DNA, 33 bp, homo sapiens
tattaaaaacatttcaycttagccaaataactt

SEQ ID NO: 6345 - DNA, 33 bp, homo sapiens
ctgctaggttctagcamgtgatatgcacaatca

SEQ ID NO: 6346 - DNA, 33 bp, homo sapiens
aaagaaggaaaacggcrcttatcttctagtcgg

SEQ ID NO: 6347 - DNA, 33 bp, homo sapiens
tgttaatgcatggtaartcatgtaacaaaggaa

SEQ ID NO: 6348 - DNA, 33 bp, homo sapiens
tcttggcccaagttacygcaagaacatgaaggt

SEQ ID NO: 6349 - DNA, 33 bp, homo sapiens
caacctcaggcaaaaaygctttccctgagttac

SEQ ID NO: 6350 - DNA, 33 bp, homo sapiens
tagcacagatatggtaytacagctctctcacat

SEQ ID NO: 6351 - DNA, 33 bp, homo sapiens
aataatgcatgcaaagrcagaggatcataaaat

SEQ ID NO: 6352 - DNA, 33 bp, homo sapiens
acctgattaatgttcawctcccaatcctttttc

SEQ ID NO: 6353 - DNA, 33 bp, homo sapiens
gggaggtttgcatctakgtatcctgtttccgta

SEQ ID NO: 6354 - DNA, 33 bp, homo sapiens
tgtcatgaactccatgmatacctgacttaagac

SEQ ID NO: 6355 - DNA, 33 bp, homo sapiens
ccttaatattgcatagwacatttagtcatttat

SEQ ID NO: 6356 - DNA, 33 bp, homo sapiens
attggagttaagcacasctatataccttcatta

SEQ ID NO: 6357 - DNA, 33 bp, homo sapiens
caatagcccaaaactayactgactgataaagct

SEQ ID NO: 6358 - DNA, 33 bp, homo sapiens
gctggaaggaataggcmattaggggaacaatat

SEQ ID NO: 6359 - DNA, 33 bp, homo sapiens
tgagagtttctgtgaayacagccaatgtgacac

SEQ ID NO: 6360 - DNA, 33 bp, homo sapiens
cattttctcaactaacrattactggatacatat

SEQ ID NO: 6361 - DNA, 33 bp, homo sapiens
ctctgccaccatgtagragggtcataggctatg

SEQ ID NO: 6362 - DNA, 33 bp, homo sapiens
catatatgtaaatagamacagaaactctcaatc

SEQ ID NO: 6363 - DNA, 33 bp, homo sapiens
agtggcagagctggaayataaactgaggtcaaa

SEQ ID NO: 6364 - DNA, 33 bp, homo sapiens
gcagtcgtccttgtcgwaggagtttcaggaaag

SEQ ID NO: 6365 - DNA, 33 bp, homo sapiens
aggaggattgaccagaygtattaatggatcaga

SEQ ID NO: 6366 - DNA, 33 bp, homo sapiens
tgttcaaaccaaagaargctaggatctttaaat

SEQ ID NO: 6367 - DNA, 33 bp, homo sapiens
caccagaaacgcatgcyacaaaagggtggtgct

SEQ ID NO: 6368 - DNA, 33 bp, homo sapiens
agatccccaagtgaccratttgcacagtaaggt

SEQ ID NO: 6369 - DNA, 33 bp, homo sapiens
actgcttgagagcagarattatagaccagcctg

SEQ ID NO: 6370 - DNA, 33 bp, homo sapiens
aatagtatcagaaatarcaaatggaacaattat

SEQ ID NO: 6371 - DNA, 33 bp, homo sapiens
ttgtgacatgggaaaaytgtatgcaattcgaaa

SEQ ID NO: 6372 - DNA, 33 bp, homo sapiens
gattcgactggctgaaraagtgaatgatcattg

SEQ ID NO: 6373 - DNA, 33 bp, homo sapiens
ttttaaacaggaggccrcctcaaaaaagtcaag

SEQ ID NO: 6374 - DNA, 33 bp, homo sapiens
gccatgagcagataaaygaatgagctagaaaaa

SEQ ID NO: 6375 - DNA, 33 bp, homo sapiens
atagaacataagtgaawtgaacagtgtcaacaa

SEQ ID NO: 6376 - DNA, 33 bp, homo sapiens
agggagcaaatactaartataatcaactcaagc

SEQ ID NO: 6377 - DNA, 33 bp, homo sapiens
tcctgtggaaataacartacattcctgagaatt

SEQ ID NO: 6378 - DNA, 33 bp, homo sapiens
gatggagttgctcataygctctttctcttgctc

SEQ ID NO: 6379 - DNA, 33 bp, homo sapiens
tctggaatccaaaaaamacattcgcgtgcctaa

SEQ ID NO: 6380 - DNA, 33 bp, homo sapiens
taagaccggcatttcawtatttcagtatcaaag

SEQ ID NO: 6381 - DNA, 33 bp, homo sapiens
ccaggggaccactagamatctaggtcttttttt

SEQ ID NO: 6382 - DNA, 33 bp, homo sapiens
agcattcatttcctccrattaaaattaagcata

SEQ ID NO: 6383 - DNA, 33 bp, homo sapiens
ggactaatgtgaattayaatagagaaggtagag

SEQ ID NO: 6384 - DNA, 33 bp, homo sapiens
cagagcagaaaactgayaaaaactctggttaag

SEQ ID NO: 6385 - DNA, 33 bp, homo sapiens
ttttgtatattgataaygtatcctgcaacctta

SEQ ID NO: 6386 - DNA, 33 bp, homo sapiens
cacaaggcctgggttamgaagaggtgcagagga

SEQ ID NO: 6387 - DNA, 33 bp, homo sapiens
gcatcctcacttctgcraactgcaatagaacca

SEQ ID NO: 6388 - DNA, 33 bp, homo sapiens
accctagtggctgtcayctctaactcctgaagg

SEQ ID NO: 6389 - DNA, 33 bp, homo sapiens
gagtcagtatcactcaycattgagtctcttaat

SEQ ID NO: 6390 - DNA, 33 bp, homo sapiens
atcacttggaagatccracctactctaacggaa

SEQ ID NO: 6391 - DNA, 33 bp, homo sapiens
agatgatgtgcatttgsagaaaaaaattcaata

SEQ ID NO: 6392 - DNA, 33 bp, homo sapiens
actgttttgccacacamaaaaacctatttatga

SEQ ID NO: 6393 - DNA, 33 bp, homo sapiens
acttgtagtaacttgarcacatctttatgtaaa

SEQ ID NO: 6394 - DNA, 33 bp, homo sapiens
aaatcattctgcaaaayacagcttagacccatt

SEQ ID NO: 6395 - DNA, 33 bp, homo sapiens
tgccgggtataaagtcrcgtctccagaggcaga

SEQ ID NO: 6396 - DNA, 33 bp, homo sapiens
agaaggtctgaggcaartgttgaagagaggagt

SEQ ID NO: 6397 - DNA, 33 bp, homo sapiens
gtgggtatcatacacaraagtcggtcatacatt

SEQ ID NO: 6398 - DNA, 33 bp, homo sapiens
aaggatcatcagagackattatggacaacttta

SEQ ID NO: 6399 - DNA, 33 bp, homo sapiens
cgaaggggaaattaacyggctatacttatgaaa

SEQ ID NO: 6400 - DNA, 33 bp, homo sapiens
ttctgactactgcccckccttgctcattttctc

SEQ ID NO: 6401 - DNA, 33 bp, homo sapiens
ctgggccactttgccaygcaggctggttgctgc

SEQ ID NO: 6402 - DNA, 33 bp, homo sapiens
gttacagtggcctaaargctatagtggtgtatg

SEQ ID NO: 6403 - DNA, 33 bp, homo sapiens
gacttgggtgaggaaartgagctgcaattttta

SEQ ID NO: 6404 - DNA, 33 bp, homo sapiens
tacggagcatataaaakaaggcaaggagctgtc

SEQ ID NO: 6405 - DNA, 33 bp, homo sapiens
aaaaataaaatgaaccraaaattgtctacattg

SEQ ID NO: 6406 - DNA, 33 bp, homo sapiens
gtttctgacatttgaaktatctagatggtaata

SEQ ID NO: 6407 - DNA, 33 bp, homo sapiens
tgtgaggaccggtataygccactctgggatttc

SEQ ID NO: 6408 - DNA, 33 bp, homo sapiens
gagagtagttacgtcartacaagctcaagtgga

SEQ ID NO: 6409 - DNA, 33 bp, homo sapiens
tagttgacaaacaatayctgtgttaatacctag

SEQ ID NO: 6410 - DNA, 33 bp, homo sapiens
cctgctcagcaacctcrgagaaaaggaggcccc

SEQ ID NO: 6411 - DNA, 33 bp, homo sapiens
tatcgagcctctactaygggtagggcacattct

SEQ ID NO: 6412 - DNA, 33 bp, homo sapiens
gcaacgcatggttaaakgcatcagtaaggctgg

SEQ ID NO: 6413 - DNA, 33 bp, homo sapiens
gcactatgttcccaacrctattctaatttaagc

SEQ ID NO: 6414 - DNA, 33 bp, homo sapiens
gtacatatgttttgtayacagctaattataata

SEQ ID NO: 6415 - DNA, 33 bp, homo sapiens
tagtgcagaatgtgtcraactcctttcccaaag

SEQ ID NO: 6416 - DNA, 33 bp, homo sapiens
gtggagtttgactatayccagcctaccacagga

SEQ ID NO: 6417 - DNA, 33 bp, homo sapiens
agatattgaaataaggycaatcaataaccctac

SEQ ID NO: 6418 - DNA, 33 bp, homo sapiens
ctaccttggcattatamcattctaatagatttt

SEQ ID NO: 6419 - DNA, 33 bp, homo sapiens
taaatccctgaacccartagtagggaccaaggt

SEQ ID NO: 6420 - DNA, 33 bp, homo sapiens
tagacttccagtgtaamtctaacaggtcccaag

SEQ ID NO: 6421 - DNA, 33 bp, homo sapiens
gatctggcaattccaaktgaatgggagagtaaa

SEQ ID NO: 6422 - DNA, 33 bp, homo sapiens
gatcagcaaattatccmgcaagttaatgcactt

SEQ ID NO: 6423 - DNA, 33 bp, homo sapiens
gcattggaagaatacasgcccaaagagggaaag

SEQ ID NO: 6424 - DNA, 33 bp, homo sapiens
accaagcattcttctawgaggtgaacatgagaa

SEQ ID NO: 6425 - DNA, 33 bp, homo sapiens
tcataccaggaccagtraaaaactcctgctacc

SEQ ID NO: 6426 - DNA, 33 bp, homo sapiens
caaccatttgtcaaaastgcatagttaaggttt

SEQ ID NO: 6427 - DNA, 33 bp, homo sapiens
tactcataggtgagcayagaaacatgaactaag

SEQ ID NO: 6428 - DNA, 33 bp, homo sapiens
aggattcaagttttcasagggataccagtcctc

SEQ ID NO: 6429 - DNA, 33 bp, homo sapiens
acgtgttaacagtttamagtgttctatagatat

SEQ ID NO: 6430 - DNA, 33 bp, homo sapiens
ttgtccgtgtttgatasaaatcaccagggtccc

SEQ ID NO: 6431 - DNA, 33 bp, homo sapiens
agtatgtctgtttctgkaatggtatctttctct

SEQ ID NO: 6432 - DNA, 33 bp, homo sapiens
tgtgagtagggcatcawgtgcttaccagagagt

SEQ ID NO: 6433 - DNA, 33 bp, homo sapiens
gaaacaccagaagtaasccatgggcctcataag

SEQ ID NO: 6434 - DNA, 33 bp, homo sapiens
ctcattattttatactsactgtctcttagcaac

SEQ ID NO: 6435 - DNA, 33 bp, homo sapiens
tggttccctaccaaatyaccctccacgccgcta

SEQ ID NO: 6436 - DNA, 33 bp, homo sapiens
ctgcattcaaacacaayccacaggtcatctcta

SEQ ID NO: 6437 - DNA, 33 bp, homo sapiens
aatgtctggaaagtgakattcactctgttcgaa

SEQ ID NO: 6438 - DNA, 33 bp, homo sapiens
ctctggaagtttaaacrctctgagcaatggtga

SEQ ID NO: 6439 - DNA, 33 bp, homo sapiens
ctggatgtgtttcccarctctctttgatttgcg

SEQ ID NO: 6440 - DNA, 33 bp, homo sapiens
aggagataatagatagyaagctcttcgaaggca

SEQ ID NO: 6441 - DNA, 33 bp, homo sapiens
attttgtctgtgattaycaggaaggttagagat

SEQ ID NO: 6442 - DNA, 33 bp, homo sapiens
gccaggattcttcagasaggaaagcaaatttag

SEQ ID NO: 6443 - DNA, 33 bp, homo sapiens
ctgggcaacttgtccaygaggaaaagtctaagc

SEQ ID NO: 6444 - DNA, 33 bp, homo sapiens
cgggaagatgaaactgmaagacactgagagacc

SEQ ID NO: 6445 - DNA, 33 bp, homo sapiens
acttaaagaacttatcsaaaatacagatcatcc

SEQ ID NO: 6446 - DNA, 33 bp, homo sapiens
caggcctattttggtarccaggagaaggggagg

SEQ ID NO: 6447 - DNA, 33 bp, homo sapiens
atgaactgaacgaagaygaaattctgcattttg

SEQ ID NO: 6448 - DNA, 33 bp, homo sapiens
tctgtgtgtgctgctgkatcaagtttctgagcc

SEQ ID NO: 6449 - DNA, 33 bp, homo sapiens
ccatgtggtgttttaayggtcataggatctaat

SEQ ID NO: 6450 - DNA, 33 bp, homo sapiens
aaaggccaatctcaccyagaatctgtatgcaat

SEQ ID NO: 6451 - DNA, 33 bp, homo sapiens
tgacttatccatatcartactaaaggtcagaag

SEQ ID NO: 6452 - DNA, 33 bp, homo sapiens
gtggtcattgtcctcartagagccaccttttga

SEQ ID NO: 6453 - DNA, 33 bp, homo sapiens
tttctctaaaggccccraacacgctgctgctgg

SEQ ID NO: 6454 - DNA, 33 bp, homo sapiens
cagatacaagacgtaarttaagaggaagccata

SEQ ID NO: 6455 - DNA, 33 bp, homo sapiens
tttgcctattaatttaygacccagcagagttaa

SEQ ID NO: 6456 - DNA, 33 bp, homo sapiens
tgattcagtaattccartcctaagaatcaatgg

SEQ ID NO: 6457 - DNA, 33 bp, homo sapiens
atctatacacgatatgraaaatagtacaaacta

SEQ ID NO: 6458 - DNA, 33 bp, homo sapiens
agaaccagctctttackccattctctgtcattc

SEQ ID NO: 6459 - DNA, 33 bp, homo sapiens
gctaaacaatcaggccratggcacaaagaacct

SEQ ID NO: 6460 - DNA, 33 bp, homo sapiens
agacagaaacaatgtcyagtccatgcagaagat

SEQ ID NO: 6461 - DNA, 33 bp, homo sapiens
atccgaaaactatcccygctagccacctgtcca

SEQ ID NO: 6462 - DNA, 33 bp, homo sapiens
cctcagtggctacataraagtcatttgcagcaa

SEQ ID NO: 6463 - DNA, 33 bp, homo sapiens
agaaaaaacaagcaaaygcaaactttcccttag

SEQ ID NO: 6464 - DNA, 33 bp, homo sapiens
aatagactgtttacctsaaaggagaataaaatg

SEQ ID NO: 6465 - DNA, 33 bp, homo sapiens
gggtgatcatctgtgargaaggaagtttgggga

SEQ ID NO: 6466 - DNA, 33 bp, homo sapiens
tggaacgagtgaaacarggaaagactctgaagg

SEQ ID NO: 6467 - DNA, 33 bp, homo sapiens
ctatctgcacaactcawatgggtaatgcttgtt

SEQ ID NO: 6468 - DNA, 33 bp, homo sapiens
gcttgtgaaatgccacsatgcccttaatattaa

SEQ ID NO: 6469 - DNA, 33 bp, homo sapiens
aatgactggagaggagsccttccttagtgttgc

SEQ ID NO: 6470 - DNA, 33 bp, homo sapiens
tcagtatccaacagaamgtggctgggactttgg

SEQ ID NO: 6471 - DNA, 33 bp, homo sapiens
aaataaagtcatacaartgatgaactcctttgt

SEQ ID NO: 6472 - DNA, 33 bp, homo sapiens
tttgtactaaatacaastgagataagtgaaagg

SEQ ID NO: 6473 - DNA, 33 bp, homo sapiens
gcttaggcacactaacyggaggagaaatgctga

SEQ ID NO: 6474 - DNA, 33 bp, homo sapiens
ccatctattgacatacsgatccaaatactgaaa

SEQ ID NO: 6475 - DNA, 33 bp, homo sapiens
tttgttacaagcaagcmcaagtggaattcagct

SEQ ID NO: 6476 - DNA, 33 bp, homo sapiens
ataatggctgtatttcrcaaccagctcacagaa

SEQ ID NO: 6477 - DNA, 33 bp, homo sapiens
agaactaccaaaggaamataccaggaaagccaa

SEQ ID NO: 6478 - DNA, 33 bp, homo sapiens
cagtcaggaaaacagtracaggcccagaacagc

SEQ ID NO: 6479 - DNA, 33 bp, homo sapiens
ttctttcctgctgggaytatttctgatcacagg

SEQ ID NO: 6480 - DNA, 33 bp, homo sapiens
gtggtgttgacataagsataaatacatagatca

SEQ ID NO: 6481 - DNA, 33 bp, homo sapiens
aagggttcacagcacaytccagggatatgacaa

SEQ ID NO: 6482 - DNA, 33 bp, homo sapiens
tcacctaagcattcaarcaagttacagaagtaa

SEQ ID NO: 6483 - DNA, 33 bp, homo sapiens
caagacatggggaaaaytgagatacccagggcc

SEQ ID NO: 6484 - DNA, 33 bp, homo sapiens
aaaaaaagtgcttccakaagagcttgctgggac

SEQ ID NO: 6485 - DNA, 33 bp, homo sapiens
ttaagtggaacaacaamttcccctctctgctac

SEQ ID NO: 6486 - DNA, 33 bp, homo sapiens
caaaggtttgcaggaamgcttttgacatatggg

SEQ ID NO: 6487 - DNA, 33 bp, homo sapiens
agagtcacctgtgtagmaatcaggacagacata

SEQ ID NO: 6488 - DNA, 33 bp, homo sapiens
atcctattttctctaascctttgaaatggctct

SEQ ID NO: 6489 - DNA, 33 bp, homo sapiens
gattggagtaagagaaygggtgtgtaggtaccc

SEQ ID NO: 6490 - DNA, 33 bp, homo sapiens
ggaaagagtttttccamgaatcaagacaaaagg

SEQ ID NO: 6491 - DNA, 33 bp, homo sapiens
tttggatattctccacwatataggtaaatgtgc

SEQ ID NO: 6492 - DNA, 33 bp, homo sapiens
aagtggaaagttgaaawggaatcaagaagagga

SEQ ID NO: 6493 - DNA, 33 bp, homo sapiens
tagttatggataaggcygagtatcttttcacat

SEQ ID NO: 6494 - DNA, 33 bp, homo sapiens
caaagtgtagtaatgargtgaggaacgaagatg

SEQ ID NO: 6495 - DNA, 33 bp, homo sapiens
gctatgttttaggaaawattctgtgttgtgcct

SEQ ID NO: 6496 - DNA, 33 bp, homo sapiens
ctcaaatgttcctttaycatacactgggtccca

SEQ ID NO: 6497 - DNA, 33 bp, homo sapiens
taacctaaaatttgcaragaaaataggacagat

SEQ ID NO: 6498 - DNA, 33 bp, homo sapiens
tgaaaacactatgctamctgaaagaagccaggc

SEQ ID NO: 6499 - DNA, 33 bp, homo sapiens
agtgacatggaaagtaraaccactgcaaatgtc

SEQ ID NO: 6500 - DNA, 33 bp, homo sapiens
attgcagtttcactccragaaagagtgctgtgc

SEQ ID NO: 6501 - DNA, 33 bp, homo sapiens
gtgacatttggcccaaytgtgactctgcttgcc

SEQ ID NO: 6502 - DNA, 33 bp, homo sapiens
tcaataggctttaagayggatgtgttgaaaaaa

SEQ ID NO: 6503 - DNA, 33 bp, homo sapiens
tataaagtaaccagcaycaaaacacaaaaagtc

SEQ ID NO: 6504 - DNA, 33 bp, homo sapiens
taattcagtgagaggaygaatggaaagtaattg

SEQ ID NO: 6505 - DNA, 33 bp, homo sapiens
gtcatgagggaccaacraagagctgagcctcca

SEQ ID NO: 6506 - DNA, 33 bp, homo sapiens
aaccacgtggaccagawggaactacataaacat

SEQ ID NO: 6507 - DNA, 33 bp, homo sapiens
ataattaaagacttgakagctatgtcaggactt

SEQ ID NO: 6508 - DNA, 33 bp, homo sapiens
tggtgacacaatgacamaaattgttcctaactg

SEQ ID NO: 6509 - DNA, 33 bp, homo sapiens
aggtcttcttttacaamctgcattcttgcttca

SEQ ID NO: 6510 - DNA, 33 bp, homo sapiens
aacagaccatatctgtraagtggaagcaagaga

SEQ ID NO: 6511 - DNA, 33 bp, homo sapiens
gctcaggatctcagaayagtcccgcttggagtt

SEQ ID NO: 6512 - DNA, 33 bp, homo sapiens
ggtctgaaacaaggcawagcgaatgattaactt

SEQ ID NO: 6513 - DNA, 33 bp, homo sapiens
ctaaagcataaataagsctaagaaagaattgtt

SEQ ID NO: 6514 - DNA, 33 bp, homo sapiens
tttggggcataacaggmatctaattatgtatag

SEQ ID NO: 6515 - DNA, 33 bp, homo sapiens
ttgtcctctatggtggyatcctgaaattggctt

SEQ ID NO: 6516 - DNA, 33 bp, homo sapiens
tcccgaggggaggtgcraggtgaagaggtgggc

SEQ ID NO: 6517 - DNA, 33 bp, homo sapiens
tttggtaggagacttaygggaagttttcagtgt

SEQ ID NO: 6518 - DNA, 33 bp, homo sapiens
ccccagtggaaatgcawtaagttagttaaagta

SEQ ID NO: 6519 - DNA, 33 bp, homo sapiens
gttataacagtgaatgscaagttataaagaagt

SEQ ID NO: 6520 - DNA, 33 bp, homo sapiens
taacatcataatgccasggacttgtgcctttag

SEQ ID NO: 6521 - DNA, 33 bp, homo sapiens
atgtcactattccaaargagaagttgatataat

SEQ ID NO: 6522 - DNA, 33 bp, homo sapiens
tgcatcttcggtcagcmatagttcttagttctt

SEQ ID NO: 6523 - DNA, 33 bp, homo sapiens
agtgacagcattcaagraatttgcattcacaca

SEQ ID NO: 6524 - DNA, 33 bp, homo sapiens
aggaaacgcatcccccyacttcctcctggcatc

SEQ ID NO: 6525 - DNA, 33 bp, homo sapiens
ttgttagcattccaccsaaatctctttggattg

SEQ ID NO: 6526 - DNA, 33 bp, homo sapiens
agcgaggtgctaaataratatgagcctggggtc

SEQ ID NO: 6527 - DNA, 33 bp, homo sapiens
tctataggctgaaaaastcctatagtgaaaaaa

SEQ ID NO: 6528 - DNA, 33 bp, homo sapiens
gaagaaatcaaccctawggacaccttgacttta

SEQ ID NO: 6529 - DNA, 33 bp, homo sapiens
taattgccttgtcccckaccacattgtgaatta

SEQ ID NO: 6530 - DNA, 33 bp, homo sapiens
agatcagcagttttggrcaatctgatatcatta

SEQ ID NO: 6531 - DNA, 33 bp, homo sapiens
ctgtggtacctagtaarctccatagaatttaag

SEQ ID NO: 6532 - DNA, 33 bp, homo sapiens
aatggctgcgccaagawgtgtgcaaggaatcag

SEQ ID NO: 6533 - DNA, 33 bp, homo sapiens
atcaacatgaaagaaargcaaaagaggtctcca

SEQ ID NO: 6534 - DNA, 33 bp, homo sapiens
atgatgaattttttccrcattgcactccaattt

SEQ ID NO: 6535 - DNA, 33 bp, homo sapiens
taggctgaataaagtaycttgccctgcccactg

SEQ ID NO: 6536 - DNA, 33 bp, homo sapiens
ctcacagcaaagatcartgagatgccaaatgtc

SEQ ID NO: 6537 - DNA, 33 bp, homo sapiens
ctggcattactggtcakgaaaaggtaacattct

SEQ ID NO: 6538 - DNA, 33 bp, homo sapiens
cctccacttacaaaacyatcagtggggcccaac

SEQ ID NO: 6539 - DNA, 33 bp, homo sapiens
gagtcggtcgtcatcarggaaagaacactgtct

SEQ ID NO: 6540 - DNA, 33 bp, homo sapiens
tcggataatggctccarctgtatccatcttact

SEQ ID NO: 6541 - DNA, 33 bp, homo sapiens
ctaactcagaagcagawagctgttctcacttat

SEQ ID NO: 6542 - DNA, 33 bp, homo sapiens
catagatggaaacaccsaagtgtggacatacac

SEQ ID NO: 6543 - DNA, 33 bp, homo sapiens
cagctcttaaaacgagwaaggcagttgtatatg

SEQ ID NO: 6544 - DNA, 33 bp, homo sapiens
agctcgagggacctggrcaggggccgcttggca

SEQ ID NO: 6545 - DNA, 33 bp, homo sapiens
atcggacatagcctaayctaaaacatgagacaa

SEQ ID NO: 6546 - DNA, 33 bp, homo sapiens
caacaaaaaaatatagyatttcagcatggtgat

SEQ ID NO: 6547 - DNA, 33 bp, homo sapiens
ggtcttttacttgtagwaaggtcagagattaca

SEQ ID NO: 6548 - DNA, 33 bp, homo sapiens
gtctagtaattataaaraggtcacaaaagatta

SEQ ID NO: 6549 - DNA, 33 bp, homo sapiens
ctggatctacatataayaggtacaattccaact

SEQ ID NO: 6550 - DNA, 33 bp, homo sapiens
tgtggcacttaatctcrcacataaacacagttg

SEQ ID NO: 6551 - DNA, 33 bp, homo sapiens
gaaaaggatccaagcargagagttccatcacct

SEQ ID NO: 6552 - DNA, 33 bp, homo sapiens
ttgcctacaagggtaayagtggaatttttctgg

SEQ ID NO: 6553 - DNA, 33 bp, homo sapiens
catgattagtgttaagyctgaaaacaagctggc

SEQ ID NO: 6554 - DNA, 33 bp, homo sapiens
agattttctaaaaacartccgcataataagatc

SEQ ID NO: 6555 - DNA, 33 bp, homo sapiens
atgcaggacagtcacaygacctagacattattc

SEQ ID NO: 6556 - DNA, 33 bp, homo sapiens
gagtccaatcagtccarcctatttttggttata

SEQ ID NO: 6557 - DNA, 33 bp, homo sapiens
aaaataccacaggttckaattccttcatagaca

SEQ ID NO: 6558 - DNA, 33 bp, homo sapiens
atttattcaaccattayctatttgtaacctacc

SEQ ID NO: 6559 - DNA, 33 bp, homo sapiens
catccttccaccaggcmgatttaagactgctaa

SEQ ID NO: 6560 - DNA, 33 bp, homo sapiens
tgaacccacaaggcgamgaaggttgcagtgagc

SEQ ID NO: 6561 - DNA, 33 bp, homo sapiens
gagaacagctgcctcargaagactgcctgggag

SEQ ID NO: 6562 - DNA, 33 bp, homo sapiens
cttccactttctgcaaygcatctacgtccaggc

SEQ ID NO: 6563 - DNA, 33 bp, homo sapiens
taaggcagcatgagcargattatactggataat

SEQ ID NO: 6564 - DNA, 33 bp, homo sapiens
tcttgatcttctaaaakcctccaacattgtaaa

SEQ ID NO: 6565 - DNA, 33 bp, homo sapiens
tgcacccagcctgaaartctccttattaaagtc

SEQ ID NO: 6566 - DNA, 33 bp, homo sapiens
tgctcaaatgctacccrcgtcttgactttcctt

SEQ ID NO: 6567 - DNA, 33 bp, homo sapiens
gtgtctgaacctggaaytggaaacagttatatc

SEQ ID NO: 6568 - DNA, 33 bp, homo sapiens
caggaaagtagatggayggtaggtgagctacaa

SEQ ID NO: 6569 - DNA, 33 bp, homo sapiens
acaattagccaaaacargtgaaagcaagcacca

SEQ ID NO: 6570 - DNA, 33 bp, homo sapiens
cagttagtatcttgtayggggaaatagaatttt

SEQ ID NO: 6571 - DNA, 33 bp, homo sapiens
ccatcattttgagttcrccatttttttctatgt

SEQ ID NO: 6572 - DNA, 33 bp, homo sapiens
caaaactccttgatcawctccctggaatgtgct

SEQ ID NO: 6573 - DNA, 33 bp, homo sapiens
atagaggaacagaaggyaggaaggaggccccag

SEQ ID NO: 6574 - DNA, 33 bp, homo sapiens
tccaggttgacaacgcraagagacaggttagcc

SEQ ID NO: 6575 - DNA, 33 bp, homo sapiens
ctgtaaatggaaattayataggaccagagagga

SEQ ID NO: 6576 - DNA, 33 bp, homo sapiens
gaacaggaagagtcaamacgataaggagaattc

SEQ ID NO: 6577 - DNA, 33 bp, homo sapiens
tcacctgtaccatgcamtatccctgtgcccact

SEQ ID NO: 6578 - DNA, 33 bp, homo sapiens
tgatttagaggttgaartagaagaatatgagcc

SEQ ID NO: 6579 - DNA, 33 bp, homo sapiens
gtgtgatggaattgtayagtctctaggatattc

SEQ ID NO: 6580 - DNA, 33 bp, homo sapiens
tttcagcgggaaaagcyagtgtggtctctgttt

SEQ ID NO: 6581 - DNA, 33 bp, homo sapiens
gaaagtggtctgctaartgagaacccattgcca

SEQ ID NO: 6582 - DNA, 33 bp, homo sapiens
aaacagcatgaaattgratttcctcatccataa

SEQ ID NO: 6583 - DNA, 33 bp, homo sapiens
cactatgagctgcaccyagacaggaccgcgaac

SEQ ID NO: 6584 - DNA, 33 bp, homo sapiens
atttgatgggtcttccraatgctcagtttctct

SEQ ID NO: 6585 - DNA, 33 bp, homo sapiens
taagaatatcataaaascaggtgacttattaaa

SEQ ID NO: 6586 - DNA, 33 bp, homo sapiens
ctctgtgaatatatgamcttaacaacgtatgcc

SEQ ID NO: 6587 - DNA, 33 bp, homo sapiens
gagacagatggggtgcmataagcacagccacag

SEQ ID NO: 6588 - DNA, 33 bp, homo sapiens
tccaccagagcaatagraaaattagctgggtgc

SEQ ID NO: 6589 - DNA, 33 bp, homo sapiens
gagaaaatccttgaaamgtcactaagaatacac

SEQ ID NO: 6590 - DNA, 33 bp, homo sapiens
cttacatatttggtgtsaaaactgtcgcgagca

SEQ ID NO: 6591 - DNA, 33 bp, homo sapiens
ctggctggtgccacaamcgtgacgcccaggtga

SEQ ID NO: 6592 - DNA, 33 bp, homo sapiens
ccttttgatggcagcayggcgtcctaggccttg

SEQ ID NO: 6593 - DNA, 33 bp, homo sapiens
aaagacttcagttgaarggtcaaagagaatcca

SEQ ID NO: 6594 - DNA, 33 bp, homo sapiens
ggagatcgaagggcccragaataaggtgctgac

SEQ ID NO: 6595 - DNA, 33 bp, homo sapiens
ggctagcaatatgcagragattaaaacggaatc

SEQ ID NO: 6596 - DNA, 33 bp, homo sapiens
aatgagccaaaaaatgraattgaggggaagatt

SEQ ID NO: 6597 - DNA, 33 bp, homo sapiens
gagtctctgtttttcaygtaacccagcacacaa

SEQ ID NO: 6598 - DNA, 33 bp, homo sapiens
gcagtatttccagacargtaagtaccctaacct

SEQ ID NO: 6599 - DNA, 33 bp, homo sapiens
gccatctgagaataccrcaaatacaaaaaacct

SEQ ID NO: 6600 - DNA, 33 bp, homo sapiens
ggacacgaagtgccgtmaaaggagagggctctc

SEQ ID NO: 6601 - DNA, 33 bp, homo sapiens
aaggaagagaaataacrctcatacagagttcac

SEQ ID NO: 6602 - DNA, 33 bp, homo sapiens
tttgttcattggataargtttggttattgaact

SEQ ID NO: 6603 - DNA, 33 bp, homo sapiens
attttgaccagggatawgtggcacaaggatggc

SEQ ID NO: 6604 - DNA, 33 bp, homo sapiens
accaccatgaccacaayaacaaaagacttaaga

SEQ ID NO: 6605 - DNA, 33 bp, homo sapiens
taatttccttcacaaaytggccttttcacggtt

SEQ ID NO: 6606 - DNA, 33 bp, homo sapiens
tgaggatctttgacaaygggtgtgataaaagga

SEQ ID NO: 6607 - DNA, 33 bp, homo sapiens
gctgcatctactagaamggctatatgttgtcca

SEQ ID NO: 6608 - DNA, 33 bp, homo sapiens
tacatatcactgttacrccaactggcttgtcaa

SEQ ID NO: 6609 - DNA, 33 bp, homo sapiens
gtactagaatactagcragagaatccttgttct

SEQ ID NO: 6610 - DNA, 33 bp, homo sapiens
gttaaatagggatttcrattgccaaaaaaacct

SEQ ID NO: 6611 - DNA, 33 bp, homo sapiens
tatctcctatgttggcmaaaagacctttgattt

SEQ ID NO: 6612 - DNA, 33 bp, homo sapiens
tggactgtcagtcatakgtggactttgcaagta

SEQ ID NO: 6613 - DNA, 33 bp, homo sapiens
tgctccttattccccayagtacaactaaaatta

SEQ ID NO: 6614 - DNA, 33 bp, homo sapiens
ggctcctattcaaaacygacattatagattatc

SEQ ID NO: 6615 - DNA, 33 bp, homo sapiens
ttctttacgtacagaawgctatatgactaagtg

SEQ ID NO: 6616 - DNA, 33 bp, homo sapiens
accatgtagaccattcmagctagtaagatatta

SEQ ID NO: 6617 - DNA, 33 bp, homo sapiens
ccagtctgaatgcacamgggtatactgaaacct

SEQ ID NO: 6618 - DNA, 33 bp, homo sapiens
atcaatttggttctaayatcacttaagatttta

SEQ ID NO: 6619 - DNA, 33 bp, homo sapiens
aacgaataatgaaaacygcctgtgaattttatt

SEQ ID NO: 6620 - DNA, 33 bp, homo sapiens
cattctcatttgcacaytaaaaaatcaagacta

SEQ ID NO: 6621 - DNA, 33 bp, homo sapiens
cataaacattcagttgwcaaatacggtctctag

SEQ ID NO: 6622 - DNA, 33 bp, homo sapiens
ctggcccagcctgtacmccagcttatacaatgt

SEQ ID NO: 6623 - DNA, 33 bp, homo sapiens
tgtgaatcctgcaatargtaagaaatcttttct

SEQ ID NO: 6624 - DNA, 33 bp, homo sapiens
tgacctaatctcttcawctccagatcttcctgc

SEQ ID NO: 6625 - DNA, 33 bp, homo sapiens
gagtaggcagttttacyctctcagtgtaaacaa

SEQ ID NO: 6626 - DNA, 33 bp, homo sapiens
aaacttttatgcttctkacttcaaaatttgtac

SEQ ID NO: 6627 - DNA, 33 bp, homo sapiens
tcgttggtactggttamcactttcctacatttt

SEQ ID NO: 6628 - DNA, 33 bp, homo sapiens
aagcagtcaagcttaaygaaacaaggttgtttc

SEQ ID NO: 6629 - DNA, 33 bp, homo sapiens
ccctggagaaatacgayattgtcttctcttctg

SEQ ID NO: 6630 - DNA, 33 bp, homo sapiens
ttgcttcacacaatccygcgaggagtgacatct

SEQ ID NO: 6631 - DNA, 33 bp, homo sapiens
ttttaacaatagaggawgctcagtaaagagtat

SEQ ID NO: 6632 - DNA, 33 bp, homo sapiens
gtcttcagcaggatacmgaaaatattaaccata

SEQ ID NO: 6633 - DNA, 33 bp, homo sapiens
actggagggacatttcyaagtgagtttcattga

SEQ ID NO: 6634 - DNA, 33 bp, homo sapiens
ctaacctggaagacaaygaactatttttctaat

SEQ ID NO: 6635 - DNA, 33 bp, homo sapiens
tctatttctaactccastaaaatgcagactaaa

SEQ ID NO: 6636 - DNA, 33 bp, homo sapiens
aaacaactccatatgarcagtcaaataagggga

SEQ ID NO: 6637 - DNA, 33 bp, homo sapiens
cataaggaagcatatgyaaaacctatagaaatt

SEQ ID NO: 6638 - DNA, 33 bp, homo sapiens
tctattctgtaagatasggaggataaactctct

SEQ ID NO: 6639 - DNA, 33 bp, homo sapiens
tacaatacacataatayaatacgaagcacgaag

SEQ ID NO: 6640 - DNA, 33 bp, homo sapiens
tcatgattgatttgtcyagttccttaagtcttg

SEQ ID NO: 6641 - DNA, 33 bp, homo sapiens
ataaataagacaacagraagtatgccatcttga

SEQ ID NO: 6642 - DNA, 33 bp, homo sapiens
taaaagtcattttatayggacaacagagactca

SEQ ID NO: 6643 - DNA, 33 bp, homo sapiens
tgcagtcatctcagaaytggaatcccaagacta

SEQ ID NO: 6644 - DNA, 33 bp, homo sapiens
tggcctgtttcacctaygaccttgctgtatgct

SEQ ID NO: 6645 - DNA, 33 bp, homo sapiens
tttcaaagaggcttaamaaaggagctatggaaa

SEQ ID NO: 6646 - DNA, 33 bp, homo sapiens
tccctacccagcaacakaacttgtattttcatt

SEQ ID NO: 6647 - DNA, 33 bp, homo sapiens
ttttctgaagtctcagratttgggccaaagagg

SEQ ID NO: 6648 - DNA, 33 bp, homo sapiens
tcatgatatgaaatcakctttctgttctaaaag

SEQ ID NO: 6649 - DNA, 33 bp, homo sapiens
aatatctgttgctaaakgcaaataaacatcaca

SEQ ID NO: 6650 - DNA, 33 bp, homo sapiens
atattcctgaatttcakactttggactagaaaa

SEQ ID NO: 6651 - DNA, 33 bp, homo sapiens
ctctcatgaaggtaackgacattttgacctttg

SEQ ID NO: 6652 - DNA, 33 bp, homo sapiens
cccacagaagctctgcrctcaaaaatggtgaaa

SEQ ID NO: 6653 - DNA, 33 bp, homo sapiens
tatgaggtaggcaaacrgattgtcctaaacttt

SEQ ID NO: 6654 - DNA, 33 bp, homo sapiens
gtctcccatcaaattaygacttcctggaggact

SEQ ID NO: 6655 - DNA, 33 bp, homo sapiens
ccactatggactttcarctcaaataaatcaggt

SEQ ID NO: 6656 - DNA, 33 bp, homo sapiens
acccatttctatgccaygtactctgttctacta

SEQ ID NO: 6657 - DNA, 33 bp, homo sapiens
gaccactttccatcaartatttatctggcacat

SEQ ID NO: 6658 - DNA, 33 bp, homo sapiens
taatattgagaagcaartcaggacacaagacca

SEQ ID NO: 6659 - DNA, 33 bp, homo sapiens
ctgttcacattttaaaygcaagccaaaaacctt

SEQ ID NO: 6660 - DNA, 33 bp, homo sapiens
agatattaatttgtgayaaaatgaaactgaccc

SEQ ID NO: 6661 - DNA, 33 bp, homo sapiens
gactaacaggtaccaarttacaggaaaatggtt

SEQ ID NO: 6662 - DNA, 33 bp, homo sapiens
tatatgaacagttgaamatttgtggattgttct

SEQ ID NO: 6663 - DNA, 33 bp, homo sapiens
tttataggaagtattargaaatctgggcactac

SEQ ID NO: 6664 - DNA, 33 bp, homo sapiens
cttctttggggctctgsagatttaatagcttgg

SEQ ID NO: 6665 - DNA, 33 bp, homo sapiens
gcaacacaactggacaytgatgaatgaattgat

SEQ ID NO: 6666 - DNA, 33 bp, homo sapiens
acttaggcaatgatccragagtctccaccagga

SEQ ID NO: 6667 - DNA, 33 bp, homo sapiens
aagagtgcttactttgmagaatagtctgttata

SEQ ID NO: 6668 - DNA, 33 bp, homo sapiens
tgatgagtacaaaaacrgaatgacagacaaggt

SEQ ID NO: 6669 - DNA, 33 bp, homo sapiens
acagcaatgtcgacaargcctgtaaatatttta

SEQ ID NO: 6670 - DNA, 33 bp, homo sapiens
cggcactgagacctgarggaagttacttaatga

SEQ ID NO: 6671 - DNA, 33 bp, homo sapiens
tgggaagcatgggaaarcaagggagccttatag

SEQ ID NO: 6672 - DNA, 33 bp, homo sapiens
cagttacctggattaaytgatgcgaacaacaat

SEQ ID NO: 6673 - DNA, 33 bp, homo sapiens
agatcagagcaaaggayaccaataacagactgg

SEQ ID NO: 6674 - DNA, 33 bp, homo sapiens
gagaaatgttgtttgcragaggtaatgcatctc

SEQ ID NO: 6675 - DNA, 33 bp, homo sapiens
gtgtgtgtgtataaagycagccttttcttaaac

SEQ ID NO: 6676 - DNA, 33 bp, homo sapiens
caggaggcagaaaaatsatcagtggaccaaatt

SEQ ID NO: 6677 - DNA, 33 bp, homo sapiens
tcagagcactttacagraccatctagactgaaa

SEQ ID NO: 6678 - DNA, 33 bp, homo sapiens
attattaagaaattcartaaaacatcctgcgca

SEQ ID NO: 6679 - DNA, 33 bp, homo sapiens
atatcaatacttacackaaacataaatggatta

SEQ ID NO: 6680 - DNA, 33 bp, homo sapiens
aatatccacagcttaastcactgagaaactcac

SEQ ID NO: 6681 - DNA, 33 bp, homo sapiens
cagtagcttttctacayagtttagcattttttc

SEQ ID NO: 6682 - DNA, 33 bp, homo sapiens
ccacaaaatatacccawtgcaactataaaatac

SEQ ID NO: 6683 - DNA, 33 bp, homo sapiens
aagtaaaggctcaaaasttcagctgtatctagg

SEQ ID NO: 6684 - DNA, 33 bp, homo sapiens
gatgggcacaaagacayggagaattccaggtgg

SEQ ID NO: 6685 - DNA, 33 bp, homo sapiens
tgaggcatgattcggamaacaaacacaggaaga

SEQ ID NO: 6686 - DNA, 33 bp, homo sapiens
taataaaaactcacaarctgtaatttttacatg

SEQ ID NO: 6687 - DNA, 33 bp, homo sapiens
acaagattacaggtgcycaaagaggtatagcga

SEQ ID NO: 6688 - DNA, 33 bp, homo sapiens
atgtcctttgttttgaygctaaccttttctggt

SEQ ID NO: 6689 - DNA, 33 bp, homo sapiens
aatcgtttagctcaatsaatttttggtatttta

SEQ ID NO: 6690 - DNA, 33 bp, homo sapiens
gattattaatcaagagrccataatgccaaggga

SEQ ID NO: 6691 - DNA, 33 bp, homo sapiens
aatgttttctcactgayctttagtaatattaac

SEQ ID NO: 6692 - DNA, 33 bp, homo sapiens
gctgggacatgtacagsctctgggatttgtgtc

SEQ ID NO: 6693 - DNA, 33 bp, homo sapiens
aaatggcttattacacrgatttgtgactcacaa

SEQ ID NO: 6694 - DNA, 33 bp, homo sapiens
tcatattctatgacacrgaacttaaaggtctca

SEQ ID NO: 6695 - DNA, 33 bp, homo sapiens
tataagctgactttacycatattttgaagtgaa

SEQ ID NO: 6696 - DNA, 33 bp, homo sapiens
gtaataactagcaagaktaaaaaagtattagta

SEQ ID NO: 6697 - DNA, 33 bp, homo sapiens
gatgataacataagcargtaaaacgtgtacatg

SEQ ID NO: 6698 - DNA, 33 bp, homo sapiens
aaaaaataagaggtccraagttgaagactgaaa

SEQ ID NO: 6699 - DNA, 33 bp, homo sapiens
tagtcctttctattcaygagaacaaccacttcc

SEQ ID NO: 6700 - DNA, 33 bp, homo sapiens
atacctgaaatacagcraaaatatcctggaccg

SEQ ID NO: 6701 - DNA, 33 bp, homo sapiens
atatttcctaagcaacrgaaccaactagctgct

SEQ ID NO: 6702 - DNA, 33 bp, homo sapiens
ttcctcctttgctctgwactctagctacactgt

SEQ ID NO: 6703 - DNA, 33 bp, homo sapiens
cattggttcaagtccartctccttgacacagta

SEQ ID NO: 6704 - DNA, 33 bp, homo sapiens
atagatggaggttagckgagggaagagtggaag

SEQ ID NO: 6705 - DNA, 33 bp, homo sapiens
tgaaagtttgaaacggsaagaatgtaattaatg

SEQ ID NO: 6706 - DNA, 33 bp, homo sapiens
cctgggttctctgcgaygtgcttcactgacctt

SEQ ID NO: 6707 - DNA, 33 bp, homo sapiens
aggtctaggatttttaraagttgctacacagta

SEQ ID NO: 6708 - DNA, 33 bp, homo sapiens
tatctaccaccatgcarctgttaagcagggagg

SEQ ID NO: 6709 - DNA, 33 bp, homo sapiens
aatttgcactttagaaraatctggagaattgaa

SEQ ID NO: 6710 - DNA, 33 bp, homo sapiens
tctaaaagttgtaatamctgcatcaggtgaaat

SEQ ID NO: 6711 - DNA, 33 bp, homo sapiens
tatgtctccaaacctaygatgacagattgacaa

SEQ ID NO: 6712 - DNA, 33 bp, homo sapiens
agtagaaataaagtgakatttggagacaggtgt

SEQ ID NO: 6713 - DNA, 33 bp, homo sapiens
agttaaatgcatagaarataatacccatgtcaa

SEQ ID NO: 6714 - DNA, 33 bp, homo sapiens
gtttccgctcctaagaratgtcttaacaaaaca

SEQ ID NO: 6715 - DNA, 33 bp, homo sapiens
ttttgaaggaaacacartccaatgggctcatgt

SEQ ID NO: 6716 - DNA, 33 bp, homo sapiens
agactaccttcttctamcatagttgtggcacat

SEQ ID NO: 6717 - DNA, 33 bp, homo sapiens
tgccatctagtgccccrcaggagtcttcactgt

SEQ ID NO: 6718 - DNA, 33 bp, homo sapiens
ccctcttttggatcacmatttatgtaaaatcat

SEQ ID NO: 6719 - DNA, 33 bp, homo sapiens
gaaatcatacacggtcrcttcacctttattcca

SEQ ID NO: 6720 - DNA, 33 bp, homo sapiens
gacttggagcttcttgragaactatgatcttgt

SEQ ID NO: 6721 - DNA, 33 bp, homo sapiens
gccttatatactacatraaggagcctaggtttt

SEQ ID NO: 6722 - DNA, 33 bp, homo sapiens
tgatggtgttctaagayatactccaaatacaat

SEQ ID NO: 6723 - DNA, 33 bp, homo sapiens
gtgggagacacagtgawaaatttcagaggaggg

SEQ ID NO: 6724 - DNA, 33 bp, homo sapiens
atgtgttttaacaggargctcaggattcatatg

SEQ ID NO: 6725 - DNA, 33 bp, homo sapiens
tccattgtagatttgaygaaggcgaagaagctg

SEQ ID NO: 6726 - DNA, 33 bp, homo sapiens
gaatctcaaaactgccraattaacttacattct

SEQ ID NO: 6727 - DNA, 33 bp, homo sapiens
gactcacatgtaagaawtcgaaaggatgagaga

SEQ ID NO: 6728 - DNA, 33 bp, homo sapiens
accaatgacaagcaaaygagagaatttagttgg

SEQ ID NO: 6729 - DNA, 33 bp, homo sapiens
aatcgatttaatgcaarctttacctcccgtgat

SEQ ID NO: 6730 - DNA, 33 bp, homo sapiens
ctgagaataacaagaaratctgtaacattggcc

SEQ ID NO: 6731 - DNA, 33 bp, homo sapiens
actttccaaataaagakaatcctacatttggcc

SEQ ID NO: 6732 - DNA, 33 bp, homo sapiens
tggggtagactccatarggactagaagaatagg

SEQ ID NO: 6733 - DNA, 33 bp, homo sapiens
ctctccaccaggcatgrcaaacttatctatgag

SEQ ID NO: 6734 - DNA, 33 bp, homo sapiens
agtgaatatactatacragtgacatctaagagc

SEQ ID NO: 6735 - DNA, 33 bp, homo sapiens
ttacagagatcagtaaygtgcccacttcagtct

SEQ ID NO: 6736 - DNA, 33 bp, homo sapiens
gtgaagtcactatgatmaatggacactgtagtc

SEQ ID NO: 6737 - DNA, 33 bp, homo sapiens
tttcacaatacaaggtwaaaattgaatagctgc

SEQ ID NO: 6738 - DNA, 33 bp, homo sapiens
taagaattttgagacamtgctgctatgatactc

SEQ ID NO: 6739 - DNA, 33 bp, homo sapiens
cacacaagaggcctctsaatctcattggctctt

SEQ ID NO: 6740 - DNA, 33 bp, homo sapiens
gagagagtgaaaggaargatggacttgaaacag

SEQ ID NO: 6741 - DNA, 33 bp, homo sapiens
aaggtctcatgcttagracagtgaggatctact

SEQ ID NO: 6742 - DNA, 33 bp, homo sapiens
cgtttgcaagaaagtarattcctaagagccaaa

SEQ ID NO: 6743 - DNA, 33 bp, homo sapiens
tgttgtggtagggatcrataacataaaaagtca

SEQ ID NO: 6744 - DNA, 33 bp, homo sapiens
tgccaatcctttgttckccaagtgagagggtaa

SEQ ID NO: 6745 - DNA, 33 bp, homo sapiens
tctccgtcagaattccyctgcagttgtttgtgg

SEQ ID NO: 6746 - DNA, 33 bp, homo sapiens
gggcaaaaatcacgtaygtaagtttgggcttat

SEQ ID NO: 6747 - DNA, 33 bp, homo sapiens
ggctagttatcccagcraatagcgagtcctgtc

SEQ ID NO: 6748 - DNA, 33 bp, homo sapiens
ttaagtttcattttcartaaaatcaatcgtagc

SEQ ID NO: 6749 - DNA, 33 bp, homo sapiens
tagttgttaccctcaaraagctactgttacctc

SEQ ID NO: 6750 - DNA, 33 bp, homo sapiens
catatgatttgcagcasatttcaatgcctaatt

SEQ ID NO: 6751 - DNA, 33 bp, homo sapiens
aaataaaattctggtayccattaacattctctg

SEQ ID NO: 6752 - DNA, 33 bp, homo sapiens
tgttgaattcctagcamctaaaatttaataaac

SEQ ID NO: 6753 - DNA, 33 bp, homo sapiens
gtatggcaacttctgcrctttgatggaaatatt

SEQ ID NO: 6754 - DNA, 33 bp, homo sapiens
ggattatctgcatgaargcattgacaagaaggt

SEQ ID NO: 6755 - DNA, 33 bp, homo sapiens
aacctaaagttggtgaycatattgtctgccaca

SEQ ID NO: 6756 - DNA, 33 bp, homo sapiens
cctcaattcaacaagcygacctaacaatcctaa

SEQ ID NO: 6757 - DNA, 33 bp, homo sapiens
aggacattattataagsaaggacaccatgtgaa

SEQ ID NO: 6758 - DNA, 33 bp, homo sapiens
atcaagttggggtcagrcaaataatagaatctt

SEQ ID NO: 6759 - DNA, 33 bp, homo sapiens
agtgaggcagaaacatsatatggccctcaattt

SEQ ID NO: 6760 - DNA, 33 bp, homo sapiens
tagatagttcagtacaytattcattcacctatc

SEQ ID NO: 6761 - DNA, 33 bp, homo sapiens
aactcacctctgtgaayaaatgtctttggttgg

SEQ ID NO: 6762 - DNA, 33 bp, homo sapiens
attatgtaggttgaaakttgaagcattacttta

SEQ ID NO: 6763 - DNA, 33 bp, homo sapiens
aatttatattgcttgasagctctttaaccatag

SEQ ID NO: 6764 - DNA, 33 bp, homo sapiens
tcttaagcattcattasgagactggaagccggg

SEQ ID NO: 6765 - DNA, 33 bp, homo sapiens
acaagtgtaatgaaaayaattctggtactggtg

SEQ ID NO: 6766 - DNA, 33 bp, homo sapiens
tgaggaaccctttcacygatggcttttaaagta

SEQ ID NO: 6767 - DNA, 33 bp, homo sapiens
gtttaaactctttccayggtgagcgtatccaag

SEQ ID NO: 6768 - DNA, 33 bp, homo sapiens
atgctaactttgcttayaaattgccatgggaca

SEQ ID NO: 6769 - DNA, 33 bp, homo sapiens
ttcttttgctggcactracttaatcacctcaat

SEQ ID NO: 6770 - DNA, 33 bp, homo sapiens
ctttttatattgggatyaggttgaagatggttt

SEQ ID NO: 6771 - DNA, 33 bp, homo sapiens
gtgaatcatttaaccaytcaaaacatagctggt

SEQ ID NO: 6772 - DNA, 33 bp, homo sapiens
cagtggcacaatatgayatcaaagctaaaggat

SEQ ID NO: 6773 - DNA, 33 bp, homo sapiens
accgtacatgctgcacracaacctgtgtcaccc

SEQ ID NO: 6774 - DNA, 33 bp, homo sapiens
ctgtatttctctagacwctgatacatttttgtc

SEQ ID NO: 6775 - DNA, 33 bp, homo sapiens
aaggcctataatttgtyaaggtgagtcatttca

SEQ ID NO: 6776 - DNA, 33 bp, homo sapiens
atgttctcaaggtcaayctacattataaatgag

SEQ ID NO: 6777 - DNA, 33 bp, homo sapiens
gaagacattttaaaggyccctgaacaaatgatt

SEQ ID NO: 6778 - DNA, 33 bp, homo sapiens
gattttgaaagggcctyaaatttgtggacttag

SEQ ID NO: 6779 - DNA, 33 bp, homo sapiens
ctgacacagatatttcrcctgtcagcacagcta

SEQ ID NO: 6780 - DNA, 33 bp, homo sapiens
tacaaatttgatcactragcatttaagatctta

SEQ ID NO: 6781 - DNA, 33 bp, homo sapiens
atatggatcaaactagraagctaaaagtcattt

SEQ ID NO: 6782 - DNA, 33 bp, homo sapiens
gaaaattggctaggtaytaaaggaattctgaga

SEQ ID NO: 6783 - DNA, 33 bp, homo sapiens
ttttaatctatagcaarcctcaagaagtataga

SEQ ID NO: 6784 - DNA, 33 bp, homo sapiens
aaaatactgcatgaaaygattgccttcctaagt

SEQ ID NO: 6785 - DNA, 33 bp, homo sapiens
tgtgaatgcaaaaccaytgatgaaatgtggtac

SEQ ID NO: 6786 - DNA, 33 bp, homo sapiens
gagtaatatgtggtaayaatgaatcttaagaga

SEQ ID NO: 6787 - DNA, 33 bp, homo sapiens
ggccagaaatttgttcyatgatgtcccaagctc

SEQ ID NO: 6788 - DNA, 33 bp, homo sapiens
atggtttttcacttcartcaacatttaaattat

SEQ ID NO: 6789 - DNA, 33 bp, homo sapiens
aagttgaagtattaatyagcttgcttgtggtga

SEQ ID NO: 6790 - DNA, 33 bp, homo sapiens
ttgactgtgtcttctcrattaagtgatcatatt

SEQ ID NO: 6791 - DNA, 33 bp, homo sapiens
aaatataggtaccctgraatgtgattttaatgc

SEQ ID NO: 6792 - DNA, 33 bp, homo sapiens
agtttcctccaatgacracacccagatcttaat

SEQ ID NO: 6793 - DNA, 33 bp, homo sapiens
aggtaagagttggttgsagcagtaactcctgaa

SEQ ID NO: 6794 - DNA, 33 bp, homo sapiens
ttcctcctgttaaaagrcttcatcattttgtat

SEQ ID NO: 6795 - DNA, 33 bp, homo sapiens
aaaatgttgataaatamccaacaatctgagact

SEQ ID NO: 6796 - DNA, 33 bp, homo sapiens
cattcacgtcgttgcayatctcttagctgtata

SEQ ID NO: 6797 - DNA, 33 bp, homo sapiens
actgaactcaatcttcwctgtgctaatggaata

SEQ ID NO: 6798 - DNA, 33 bp, homo sapiens
tgagtaaaggcccccartgaggatgcaatgaga

SEQ ID NO: 6799 - DNA, 33 bp, homo sapiens
actcagctacttccagrcgttaaaagctgatag

SEQ ID NO: 6800 - DNA, 33 bp, homo sapiens
tatggtggggaccatcyattgtcctgacattat

SEQ ID NO: 6801 - DNA, 33 bp, homo sapiens
gctaaagctaagtgacrgatacatgggagtcca

SEQ ID NO: 6802 - DNA, 33 bp, homo sapiens
attattttatctgtcawatattagtcccactga

SEQ ID NO: 6803 - DNA, 33 bp, homo sapiens
tatttacttgagccaasatagtttttctgctat

SEQ ID NO: 6804 - DNA, 33 bp, homo sapiens
acttcacataggtttayacttcatgtagcctgg

SEQ ID NO: 6805 - DNA, 33 bp, homo sapiens
gcagcagggacccttaycatgcagctacagttc

SEQ ID NO: 6806 - DNA, 33 bp, homo sapiens
ccagctttgtcccaacygaactatgtttaggac

SEQ ID NO: 6807 - DNA, 33 bp, homo sapiens
taaatatgcagagacaytgctaaagacacagag

SEQ ID NO: 6808 - DNA, 33 bp, homo sapiens
acgtggagagaacagawggttccgacatcctca

SEQ ID NO: 6809 - DNA, 33 bp, homo sapiens
atgagaggctgggttcratagctcacgcctgta

SEQ ID NO: 6810 - DNA, 33 bp, homo sapiens
tcttggcctctgtcctsactaatgtgatcgtga

SEQ ID NO: 6811 - DNA, 33 bp, homo sapiens
ctcattcttggcaaagkcttcctttcttggtgc

SEQ ID NO: 6812 - DNA, 33 bp, homo sapiens
gaacttcacttccacaytccacaggggtcctac

SEQ ID NO: 6813 - DNA, 33 bp, homo sapiens
ttccttgcaaaattaasagacaggcttaaagag

SEQ ID NO: 6814 - DNA, 33 bp, homo sapiens
atcatttccttttcagragtctacaggtaaaaa

SEQ ID NO: 6815 - DNA, 33 bp, homo sapiens
ctgtctcaagaaaaaaraagtgactcaccaagt

SEQ ID NO: 6816 - DNA, 33 bp, homo sapiens
aaaatttccagctagamagtgacgaggagtagg

SEQ ID NO: 6817 - DNA, 33 bp, homo sapiens
agaggggcaagtctgakaaattgtggatcaggg

SEQ ID NO: 6818 - DNA, 33 bp, homo sapiens
agcatgaacaaagccamaaggtcttcataaaca

SEQ ID NO: 6819 - DNA, 33 bp, homo sapiens
agcctctgaggatctasgaggttttgtgacagg

SEQ ID NO: 6820 - DNA, 33 bp, homo sapiens
ggtcctatagctttcargtaatatctgggggtg

SEQ ID NO: 6821 - DNA, 33 bp, homo sapiens
tgcctccagaggtcaarcttccttgtccaagtt

SEQ ID NO: 6822 - DNA, 33 bp, homo sapiens
tctgtactgagtctccrgagtcctttctgccca

SEQ ID NO: 6823 - DNA, 33 bp, homo sapiens
aagaaagtcaggcaaargagtttaaacatctgt

SEQ ID NO: 6824 - DNA, 33 bp, homo sapiens
aaaaattagaatggacraatgcattgagaaacc

SEQ ID NO: 6825 - DNA, 33 bp, homo sapiens
gtctttaggaaatgctraaatgagagcacagtc

SEQ ID NO: 6826 - DNA, 33 bp, homo sapiens
cacgattgccccaaagsattcatcgaactacgt

SEQ ID NO: 6827 - DNA, 33 bp, homo sapiens
tcctaaacttctttccwgcatctcacttaaaga

SEQ ID NO: 6828 - DNA, 33 bp, homo sapiens
aggagctgggtttgaartgtctatgggacagca

SEQ ID NO: 6829 - DNA, 33 bp, homo sapiens
gtccctctgaagtatayagcatttgttagaaga

SEQ ID NO: 6830 - DNA, 33 bp, homo sapiens
cagggatgtaaagatgwaccttttgagaagctg

SEQ ID NO: 6831 - DNA, 33 bp, homo sapiens
ttggcactcttcctcamcctcaagactctgcct

SEQ ID NO: 6832 - DNA, 33 bp, homo sapiens
gagagcaggactctaayaacatgtggccacgtg

SEQ ID NO: 6833 - DNA, 33 bp, homo sapiens
ggccagtggcttgtcawcacctgcaggatagac

SEQ ID NO: 6834 - DNA, 33 bp, homo sapiens
ctttttttcttctttawcacagaagcatccagg

SEQ ID NO: 6835 - DNA, 33 bp, homo sapiens
ctgagattgaactacamagtgcaatgggattta

SEQ ID NO: 6836 - DNA, 33 bp, homo sapiens
attgattgacttagaaytgaaaaagagagaacg

SEQ ID NO: 6837 - DNA, 33 bp, homo sapiens
gtataacatttccccaygatcctactgagattt

SEQ ID NO: 6838 - DNA, 33 bp, homo sapiens
gagaataagatacagargtaagcaatgtaagtg

SEQ ID NO: 6839 - DNA, 33 bp, homo sapiens
attcagtgccttagatraaaagcatctccatgt

SEQ ID NO: 6840 - DNA, 33 bp, homo sapiens
gatcacaagaactttgwaaggtggtgttattgt

SEQ ID NO: 6841 - DNA, 33 bp, homo sapiens
ttgtgtaaacactcccratattgtcgatttcta

SEQ ID NO: 6842 - DNA, 33 bp, homo sapiens
agtggaaaatccaagamtctagcaatttccttc

SEQ ID NO: 6843 - DNA, 33 bp, homo sapiens
gactacgcagcttcctracatcctggcttgggg

SEQ ID NO: 6844 - DNA, 33 bp, homo sapiens
ggtttcactgcgacaastctcctatcttgcatc

SEQ ID NO: 6845 - DNA, 33 bp, homo sapiens
ttttgtaacaataggcsatatacccctgagctg

SEQ ID NO: 6846 - DNA, 33 bp, homo sapiens
ctatcctatagagttaygggccagattgaatga

SEQ ID NO: 6847 - DNA, 33 bp, homo sapiens
aggttagtggatccaaygctattaagttggtgc

SEQ ID NO: 6848 - DNA, 33 bp, homo sapiens
cagcttctaaatactgmagagtgccagaggact

SEQ ID NO: 6849 - DNA, 33 bp, homo sapiens
gtagatgttgtatataygcttggtgaatttttt

SEQ ID NO: 6850 - DNA, 33 bp, homo sapiens
gcaaaaatagacaaatraggttgaatcaaactg

SEQ ID NO: 6851 - DNA, 33 bp, homo sapiens
tgagcaacatcaatgargaaagtgttgtgacga

SEQ ID NO: 6852 - DNA, 33 bp, homo sapiens
catggaggcaaactacrgtagctgattaccatt

SEQ ID NO: 6853 - DNA, 33 bp, homo sapiens
actgcttgaaatgaaaygactttttggtttatg

SEQ ID NO: 6854 - DNA, 33 bp, homo sapiens
ttaccttatttggccayataaaagtttgactgc

SEQ ID NO: 6855 - DNA, 33 bp, homo sapiens
tccttcaggattacaayggtggcaatactcttt

SEQ ID NO: 6856 - DNA, 33 bp, homo sapiens
gcagcccatcggaatcmgacagaaatggattaa

SEQ ID NO: 6857 - DNA, 33 bp, homo sapiens
tggtgaagtctttacastcactcataataggaa

SEQ ID NO: 6858 - DNA, 33 bp, homo sapiens
tttgacctttgtatgasaggtttttctttgagt

SEQ ID NO: 6859 - DNA, 33 bp, homo sapiens
ttattcctggcttataygatgtagtcatttttg

SEQ ID NO: 6860 - DNA, 33 bp, homo sapiens
aagtttaggcaggaaaytgatacttatatacta

SEQ ID NO: 6861 - DNA, 33 bp, homo sapiens
atctcaaagtcacgtarctaataagtagaggac

SEQ ID NO: 6862 - DNA, 33 bp, homo sapiens
tctccttctgtctttcmaacacgcagtatcaac

SEQ ID NO: 6863 - DNA, 33 bp, homo sapiens
ttttacttgcccctctmactagacctcctgcgt

SEQ ID NO: 6864 - DNA, 33 bp, homo sapiens
actttgctatgagaggratatgactgataacac

SEQ ID NO: 6865 - DNA, 33 bp, homo sapiens
atggggatcggaaaaarcccggactcgtagctg

SEQ ID NO: 6866 - DNA, 33 bp, homo sapiens
tcagctcttccttccaygccatttgcctgggta

SEQ ID NO: 6867 - DNA, 33 bp, homo sapiens
ttccttctttaaagccraatgctggcaaaaagg

SEQ ID NO: 6868 - DNA, 33 bp, homo sapiens
agcagctggtatttacrgagcctcatagagtca

SEQ ID NO: 6869 - DNA, 33 bp, homo sapiens
cttctcagaacaaaaasatttctttcaagatat

SEQ ID NO: 6870 - DNA, 33 bp, homo sapiens
tacagaattggagaaarggttatattctgcttt

SEQ ID NO: 6871 - DNA, 33 bp, homo sapiens
aactcaggggaattccrcaaaaatctaggtacc

SEQ ID NO: 6872 - DNA, 33 bp, homo sapiens
aagttaaagtttctaayacaatgtcttctgaac

SEQ ID NO: 6873 - DNA, 33 bp, homo sapiens
gtcatgagaacttcacrctgcaatggtgaatgg

SEQ ID NO: 6874 - DNA, 33 bp, homo sapiens
atgtatgcgctgataastcgtaggttgatgacg

SEQ ID NO: 6875 - DNA, 33 bp, homo sapiens
aaaggagttaactagcraaatggacaaagctaa

SEQ ID NO: 6876 - DNA, 33 bp, homo sapiens
ttgcctctaacactgawgatattccactcatat

SEQ ID NO: 6877 - DNA, 33 bp, homo sapiens
gacttggtctgtgcacyggaggggttggttgcc

SEQ ID NO: 6878 - DNA, 33 bp, homo sapiens
gggcgatggggaacacyatttccattagttcaa

SEQ ID NO: 6879 - DNA, 33 bp, homo sapiens
gctcactgcatcagccrctgaaactgtcatcaa

SEQ ID NO: 6880 - DNA, 33 bp, homo sapiens
tctctttctgatgcacyatcagtaactcagctt

SEQ ID NO: 6881 - DNA, 33 bp, homo sapiens
agtaagtgttgtctgcragcatgccgtcttacc

SEQ ID NO: 6882 - DNA, 33 bp, homo sapiens
aatacagccaagattayctaaacagcccaatag

SEQ ID NO: 6883 - DNA, 33 bp, homo sapiens
caagcatagttctgaarccaccaaagtccaacc

SEQ ID NO: 6884 - DNA, 33 bp, homo sapiens
aaaaaggcttggagccyagactttggaaacgtg

SEQ ID NO: 6885 - DNA, 33 bp, homo sapiens
gctccgtttttctgtawgtacatttggtcttgt

SEQ ID NO: 6886 - DNA, 33 bp, homo sapiens
gacgaggatggcaagayctatagagaacggcaa

SEQ ID NO: 6887 - DNA, 33 bp, homo sapiens
cattagtatttgggcayatgtcaaccagagggc

SEQ ID NO: 6888 - DNA, 33 bp, homo sapiens
ctgaggaataaagaaawctggagtagaaacagg

SEQ ID NO: 6889 - DNA, 33 bp, homo sapiens
tcaagttctcaataacyacatgaggccagtggc

SEQ ID NO: 6890 - DNA, 33 bp, homo sapiens
gacttgactgatagaarcgcccagtgaactgtg

SEQ ID NO: 6891 - DNA, 33 bp, homo sapiens
ggcagtggaagcagcaragataaacccaagatt

SEQ ID NO: 6892 - DNA, 33 bp, homo sapiens
gaaaacaaaatacagcragggtagctatacata

SEQ ID NO: 6893 - DNA, 33 bp, homo sapiens
agcagagagtttagtaygatggaagacacaaga

SEQ ID NO: 6894 - DNA, 33 bp, homo sapiens
actacagcttttagccrgaggacatgtcatatg

SEQ ID NO: 6895 - DNA, 33 bp, homo sapiens
acgtttttatggcacartatgggtagaaactat

SEQ ID NO: 6896 - DNA, 33 bp, homo sapiens
gcctctcattgtggtcyactacttatattttgc

SEQ ID NO: 6897 - DNA, 33 bp, homo sapiens
aattaaacatttcaagyctggttgccttatgat

SEQ ID NO: 6898 - DNA, 33 bp, homo sapiens
gagaatagtagaataasaatcaagcatatgaga

SEQ ID NO: 6899 - DNA, 33 bp, homo sapiens
tgtggagggggaaacamcgattggaataaatgc

SEQ ID NO: 6900 - DNA, 33 bp, homo sapiens
gctcatcagtttccaasatatacttttgcatct

SEQ ID NO: 6901 - DNA, 33 bp, homo sapiens
gatacttctcagagcckccaaaagaaaccaacg

SEQ ID NO: 6902 - DNA, 33 bp, homo sapiens
gtcacacattcccaatsactgaaggtgctgttc

SEQ ID NO: 6903 - DNA, 33 bp, homo sapiens
gggcaacagaggcataygataaattttctattc

SEQ ID NO: 6904 - DNA, 33 bp, homo sapiens
aacattttggcatatasaatataaatcataggg

SEQ ID NO: 6905 - DNA, 33 bp, homo sapiens
caatccctgttataagsaaatcaacataataat

SEQ ID NO: 6906 - DNA, 33 bp, homo sapiens
ctactatgttccgggtraaatactgctgttgaa

SEQ ID NO: 6907 - DNA, 33 bp, homo sapiens
acgagtacattttaaakttggcaataacagaaa

SEQ ID NO: 6908 - DNA, 33 bp, homo sapiens
gattttccatgtaacawataatctgcaagaaga

SEQ ID NO: 6909 - DNA, 33 bp, homo sapiens
tgagatacttactgaamatgagttaaaattgtt

SEQ ID NO: 6910 - DNA, 33 bp, homo sapiens
ctaagccctcactgcarcaagggataaacccaa

SEQ ID NO: 6911 - DNA, 33 bp, homo sapiens
gctaactgatggcatcrctcaactttcaaatac

SEQ ID NO: 6912 - DNA, 33 bp, homo sapiens
aggtcatacatactaasctgagaatgcaatagt

SEQ ID NO: 6913 - DNA, 33 bp, homo sapiens
ttattgtcctaattggraattatcttgaagccg

SEQ ID NO: 6914 - DNA, 33 bp, homo sapiens
gaaagcaaacagtctaygctttggcaaggagga

SEQ ID NO: 6915 - DNA, 33 bp, homo sapiens
acattagaaaacaggcrgaaaggaaccatgatg

SEQ ID NO: 6916 - DNA, 33 bp, homo sapiens
taggtcattccttagartctaaatccaggatat

SEQ ID NO: 6917 - DNA, 33 bp, homo sapiens
aaatgtgggctaattaraggattttgatttagt

SEQ ID NO: 6918 - DNA, 33 bp, homo sapiens
tgccttccattgtcgcygccttcctttggccac

SEQ ID NO: 6919 - DNA, 33 bp, homo sapiens
tctttgcttcttttgaygggtcactttgccatg

SEQ ID NO: 6920 - DNA, 33 bp, homo sapiens
tccctagacgagaaaarctaaatgtggctagaa

SEQ ID NO: 6921 - DNA, 33 bp, homo sapiens
ggagatctctgaatacygcctcatgaatagact

SEQ ID NO: 6922 - DNA, 33 bp, homo sapiens
aatatttgggtaggcarcatctctttacaatat

SEQ ID NO: 6923 - DNA, 33 bp, homo sapiens
cttacaagaaaggagastaggccgggtgtcatg

SEQ ID NO: 6924 - DNA, 33 bp, homo sapiens
ttttgccgagatcaccracaatatccaacctgt

SEQ ID NO: 6925 - DNA, 33 bp, homo sapiens
gaagagacagtttaccrgctcctatgacaagag

SEQ ID NO: 6926 - DNA, 33 bp, homo sapiens
accagggcatggaaaaycaatccctgagatgag

SEQ ID NO: 6927 - DNA, 33 bp, homo sapiens
ttctcttttacacatcrcccactataaatgctg

SEQ ID NO: 6928 - DNA, 33 bp, homo sapiens
aagctacatttcatccragaagaggaagccagt

SEQ ID NO: 6929 - DNA, 33 bp, homo sapiens
tgtggggaaacagaaaygctcttacactgttgg

SEQ ID NO: 6930 - DNA, 33 bp, homo sapiens
ggctatctcacggcgaygtcagccacatgtgaa

SEQ ID NO: 6931 - DNA, 33 bp, homo sapiens
tctgtttggcccccaastaattcactctaggat

SEQ ID NO: 6932 - DNA, 33 bp, homo sapiens
cgccctgaacatgcaastgtgcccagcaacggg

SEQ ID NO: 6933 - DNA, 33 bp, homo sapiens
ctggagagtgacccaartagaccaggatggcca

SEQ ID NO: 6934 - DNA, 33 bp, homo sapiens
cactgtcgccttgctakgaatgaagaaacaagg

SEQ ID NO: 6935 - DNA, 33 bp, homo sapiens
atccaggcttttcctcrcagtggcaatgtaact

SEQ ID NO: 6936 - DNA, 33 bp, homo sapiens
ctaggattggtgggggkaagcattaggaatgat

SEQ ID NO: 6937 - DNA, 33 bp, homo sapiens
tttttttttccttacartcgccttccgtaagcc

SEQ ID NO: 6938 - DNA, 33 bp, homo sapiens
gactctgaagcagtgargtggaaccctggcctt

SEQ ID NO: 6939 - DNA, 33 bp, homo sapiens
gttcatttcagaaaacratgtgaaatctcgttc

SEQ ID NO: 6940 - DNA, 33 bp, homo sapiens
cgactgccaaaagttayagccatgaatatatta

SEQ ID NO: 6941 - DNA, 33 bp, homo sapiens
caggttctgcagaaggratcaccatccttttct

SEQ ID NO: 6942 - DNA, 33 bp, homo sapiens
cagtttggcgatgtgtyaatgttggatactctt

SEQ ID NO: 6943 - DNA, 33 bp, homo sapiens
aactcctggggttctamcaagtcattcatattt

SEQ ID NO: 6944 - DNA, 33 bp, homo sapiens
tcagtttcagacacaarcaattttccttcactg

SEQ ID NO: 6945 - DNA, 33 bp, homo sapiens
tgcagcagtgggcacayaaatttagaatggagg

SEQ ID NO: 6946 - DNA, 33 bp, homo sapiens
acttctgctttacaggraagagtacctgggtgc

SEQ ID NO: 6947 - DNA, 33 bp, homo sapiens
caaattctcgcctggargtcagttaagaaaagg

SEQ ID NO: 6948 - DNA, 33 bp, homo sapiens
aagaagtatctacatcrcaaacacattttcgac

SEQ ID NO: 6949 - DNA, 33 bp, homo sapiens
cgtaccaagcactggargtatttaaatgcacaa

SEQ ID NO: 6950 - DNA, 33 bp, homo sapiens
cttgctttggtaatcamaggtttcattgagtgc

SEQ ID NO: 6951 - DNA, 33 bp, homo sapiens
ctgatagaaaccgagarggctgcaatgaccacg

SEQ ID NO: 6952 - DNA, 33 bp, homo sapiens
ctgtgccaatcctgcarataactcctgtcactg

SEQ ID NO: 6953 - DNA, 33 bp, homo sapiens
cctgccagcaacattcwacaaaggtcctgcttt

SEQ ID NO: 6954 - DNA, 33 bp, homo sapiens
agggatcctacacaaaygtgcctatcactggtc

SEQ ID NO: 6955 - DNA, 33 bp, homo sapiens
ttgaatgggtaagaaasaggctgtagcattcct

SEQ ID NO: 6956 - DNA, 33 bp, homo sapiens
ctcccacttttaccccrcgctttctcactctcc

SEQ ID NO: 6957 - DNA, 33 bp, homo sapiens
agaagccctccatgtcraagtctccagctcaga

SEQ ID NO: 6958 - DNA, 33 bp, homo sapiens
gtttggctaagggttcrcacctgtcctcttcta

SEQ ID NO: 6959 - DNA, 33 bp, homo sapiens
tttaattgcagcttcaygaaaaaataatccctg

SEQ ID NO: 6960 - DNA, 33 bp, homo sapiens
acctgttgaactcgtgsaaggaattagatactc

SEQ ID NO: 6961 - DNA, 33 bp, homo sapiens
ggtgggcgcccaagacratgtgcctggcgatat

SEQ ID NO: 6962 - DNA, 33 bp, homo sapiens
gatgtatactatcaaaraatttgcagactaatt

SEQ ID NO: 6963 - DNA, 33 bp, homo sapiens
ccattcatgatcaagaytctcagaaacctgtga

SEQ ID NO: 6964 - DNA, 33 bp, homo sapiens
tgtgtcacttagatgarcttgtgcctccgagtc

SEQ ID NO: 6965 - DNA, 33 bp, homo sapiens
acacagcagcgggatayagacggtggtccctcc

SEQ ID NO: 6966 - DNA, 33 bp, homo sapiens
ttaaaaattctagaaaytctggatgtggaaaac

SEQ ID NO: 6967 - DNA, 33 bp, homo sapiens
acaggcaccagcagackaggtagttggaggaga

SEQ ID NO: 6968 - DNA, 33 bp, homo sapiens
agaaaggccaactgccrcccagaagagagtggg

SEQ ID NO: 6969 - DNA, 33 bp, homo sapiens
gaattcaagaatcgtargaaaacactactaatg

SEQ ID NO: 6970 - DNA, 33 bp, homo sapiens
tggccctttttatctcrgaaaatgcttcctgcc

SEQ ID NO: 6971 - DNA, 33 bp, homo sapiens
atccagtgggagaatcragacagtctctggggg

SEQ ID NO: 6972 - DNA, 33 bp, homo sapiens
cactattattactttaygccatttcagtcacaa

SEQ ID NO: 6973 - DNA, 33 bp, homo sapiens
aagacagagcagaccarcgtcccaagaatgatt

SEQ ID NO: 6974 - DNA, 33 bp, homo sapiens
attagacggcgcctctraaataacaaggccgtt

SEQ ID NO: 6975 - DNA, 33 bp, homo sapiens
ctggctcttggaccatraccagcgttcactgag

SEQ ID NO: 6976 - DNA, 33 bp, homo sapiens
gatagataaaagcaccrggtattgacaacaagg

SEQ ID NO: 6977 - DNA, 33 bp, homo sapiens
aatgttgcatcaaagasagaatgccagtaaaga

SEQ ID NO: 6978 - DNA, 33 bp, homo sapiens
atacatttaagatatamctttgtcacaatttct

SEQ ID NO: 6979 - DNA, 33 bp, homo sapiens
gtccataaaatcagccrcaacaggcctgtgtat

SEQ ID NO: 6980 - DNA, 33 bp, homo sapiens
tccagtgcaacagcgtracaccaatacaatgca

SEQ ID NO: 6981 - DNA, 33 bp, homo sapiens
ggtccccttctgcatgmaggattcgctcaagtc

SEQ ID NO: 6982 - DNA, 33 bp, homo sapiens
gtgcctgacagatacaygatttccaccagctgc

SEQ ID NO: 6983 - DNA, 33 bp, homo sapiens
gtagggcttgggtagtraaacaaccaggctgat

SEQ ID NO: 6984 - DNA, 33 bp, homo sapiens
atgggcaagccgtctgkagacatcccaacacca

SEQ ID NO: 6985 - DNA, 33 bp, homo sapiens
gctacgggaatgctccrctcggaaggatgatga

SEQ ID NO: 6986 - DNA, 33 bp, homo sapiens
gtgaagcacttacctgragcaggaggatgaact

SEQ ID NO: 6987 - DNA, 33 bp, homo sapiens
atctacagtaaaaccayagggttgatctttggt

SEQ ID NO: 6988 - DNA, 33 bp, homo sapiens
aattttgaaacgagacratggcaatctgaccca

SEQ ID NO: 6989 - DNA, 33 bp, homo sapiens
actagggattggaatcragcaatacgtcagtgg

SEQ ID NO: 6990 - DNA, 33 bp, homo sapiens
gaacctctcttttgaayctgtcacctaccattt

SEQ ID NO: 6991 - DNA, 33 bp, homo sapiens
gaccaagtccaagggcratatcacaggaatgga

SEQ ID NO: 6992 - DNA, 33 bp, homo sapiens
gcagagaagtttagcayggaggctttcagaggc

SEQ ID NO: 6993 - DNA, 33 bp, homo sapiens
ccacgtgtgtagaaaascatgcctgtgcagagc

SEQ ID NO: 6994 - DNA, 33 bp, homo sapiens
attctctggaaacttaractttacacctactgt

SEQ ID NO: 6995 - DNA, 33 bp, homo sapiens
gtgtgtgtgtgcgcackcaagctcatgtgtgca

SEQ ID NO: 6996 - DNA, 33 bp, homo sapiens
ccagcacagaaagaatsacaaattgctaagctt

SEQ ID NO: 6997 - DNA, 33 bp, homo sapiens
ggaaaacaggcaaagcrcacactgtctgcatcg

SEQ ID NO: 6998 - DNA, 33 bp, homo sapiens
gagaagtgagattttgyatataaagcacttggt

SEQ ID NO: 6999 - DNA, 33 bp, homo sapiens
gttgaattgattgaaastaagatgctggtttag

SEQ ID NO: 7000 - DNA, 33 bp, homo sapiens
taaagcaaagtttaggwcacaaccctactccat

SEQ ID NO: 7001 - DNA, 33 bp, homo sapiens
aataatcttgaggcagsaacaactgtctagtaa

SEQ ID NO: 7002 - DNA, 33 bp, homo sapiens
tgataactgaattggastacgttgtgtttgcac

SEQ ID NO: 7003 - DNA, 33 bp, homo sapiens
caacctcactgcaatasgaaagtgaacattttt

SEQ ID NO: 7004 - DNA, 33 bp, homo sapiens
tgtttcgtgtgataaasagtcagaaaaagtatg

SEQ ID NO: 7005 - DNA, 33 bp, homo sapiens
gtttacttttgcaaacrggaaagttcttttggg

SEQ ID NO: 7006 - DNA, 33 bp, homo sapiens
atatggttaaattcgasatgagaaaataccttg

SEQ ID NO: 7007 - DNA, 33 bp, homo sapiens
actggtcctcgttggcyaattcaggatgtgatg

SEQ ID NO: 7008 - DNA, 33 bp, homo sapiens
agactggaagcaaaaamattattaggtttcaga

SEQ ID NO: 7009 - DNA, 33 bp, homo sapiens
ttccattcaggtgtaasggaaggaacaaaggga

SEQ ID NO: 7010 - DNA, 33 bp, homo sapiens
ttattgcagcatttatsacatgatgactctgag

SEQ ID NO: 7011 - DNA, 33 bp, homo sapiens
tccactgctggaagccrctgaactggaaacgta

SEQ ID NO: 7012 - DNA, 33 bp, homo sapiens
ctctgtagcccgttcaragcagaatcaaattca

SEQ ID NO: 7013 - DNA, 33 bp, homo sapiens
tgatgaagttactgackagagaaggccagtggc

SEQ ID NO: 7014 - DNA, 33 bp, homo sapiens
aattatccgaatatackgaactgcatgaaatga

SEQ ID NO: 7015 - DNA, 33 bp, homo sapiens
gtgcatcctgccagcartcacttttctatttgt

SEQ ID NO: 7016 - DNA, 33 bp, homo sapiens
cattaagttatcctcarctcattattacagaag

SEQ ID NO: 7017 - DNA, 33 bp, homo sapiens
acttgtgttttactaamatttctgaatctcata

SEQ ID NO: 7018 - DNA, 33 bp, homo sapiens
gggaacaaggagcaaartggtcagtagaggatg

SEQ ID NO: 7019 - DNA, 33 bp, homo sapiens
gagctcttattctgaaygagtatttttcctgaa

SEQ ID NO: 7020 - DNA, 33 bp, homo sapiens
ctcattgttattccagmaagagaaagagagcaa

SEQ ID NO: 7021 - DNA, 33 bp, homo sapiens
tatgccagatactggakagaaaaagttgaacac

SEQ ID NO: 7022 - DNA, 33 bp, homo sapiens
aatcaaagttccataakcttctgtaaatttcca

SEQ ID NO: 7023 - DNA, 33 bp, homo sapiens
gtggtgtaggtgaatargaagggcccatgcgtt

SEQ ID NO: 7024 - DNA, 33 bp, homo sapiens
tcacgtattattcaagsaaggtttatacacata

SEQ ID NO: 7025 - DNA, 33 bp, homo sapiens
tcatcaaagaaatcaaratatcccatagactaa

SEQ ID NO: 7026 - DNA, 33 bp, homo sapiens
aaagaggaaatatatartagtaagctgattttg

SEQ ID NO: 7027 - DNA, 33 bp, homo sapiens
acttatctgaaccaaaytgaattctgatgtcct

SEQ ID NO: 7028 - DNA, 33 bp, homo sapiens
acctggtgacttttaasaaatctccattcactt

SEQ ID NO: 7029 - DNA, 33 bp, homo sapiens
atcttttattacatctsaaaacctagccttctc

SEQ ID NO: 7030 - DNA, 33 bp, homo sapiens
taattggaagaaatcasattccagttatgaccc

SEQ ID NO: 7031 - DNA, 33 bp, homo sapiens
aaatcaatcatctgaaygaaagtttaagatgat

SEQ ID NO: 7032 - DNA, 33 bp, homo sapiens
ggatggatcgtctccasatttaaaggcctcaat

SEQ ID NO: 7033 - DNA, 33 bp, homo sapiens
tgtgctgtgggaagtgratttagagtaacaatc

SEQ ID NO: 7034 - DNA, 33 bp, homo sapiens
acttccctagtacacargttttgggcttgacct

SEQ ID NO: 7035 - DNA, 33 bp, homo sapiens
gggggactactgtatayacctgggcctccgtat

SEQ ID NO: 7036 - DNA, 33 bp, homo sapiens
ggagtgcccaccaacastgagtttcaattgggc

SEQ ID NO: 7037 - DNA, 33 bp, homo sapiens
gaaaggtgctgtgcaartaactggtattaccgt

SEQ ID NO: 7038 - DNA, 33 bp, homo sapiens
taagcagctcaaagacragaccttaactggaac

SEQ ID NO: 7039 - DNA, 33 bp, homo sapiens
tgctgtgatatgcaaaytggaaattatggccaa

SEQ ID NO: 7040 - DNA, 33 bp, homo sapiens
taatacagtgaagaaakgaagtgttgagggtca

SEQ ID NO: 7041 - DNA, 33 bp, homo sapiens
cctaaaattaaagcaarttcagatgtattacta

SEQ ID NO: 7042 - DNA, 33 bp, homo sapiens
actcttgagttaagatraaacctgaatctcaac

SEQ ID NO: 7043 - DNA, 33 bp, homo sapiens
ttttatcgtaaacattyaagcaccgtgtataat

SEQ ID NO: 7044 - DNA, 33 bp, homo sapiens
acagtgccaagagggayggtgatacctattcat

SEQ ID NO: 7045 - DNA, 33 bp, homo sapiens
tgatacagtctgatcartaaaaaactttgaagg

SEQ ID NO: 7046 - DNA, 33 bp, homo sapiens
atttatcagcttcacaraacatgctaaaaagat

SEQ ID NO: 7047 - DNA, 33 bp, homo sapiens
ccccttatccttcaackatctacttttgacaac

SEQ ID NO: 7048 - DNA, 33 bp, homo sapiens
cctttcagataggacaycagattacagacagtt

SEQ ID NO: 7049 - DNA, 33 bp, homo sapiens
gatgtcctatctgaaasgtagctgagaataaac

SEQ ID NO: 7050 - DNA, 33 bp, homo sapiens
accctcctattctgaarcactccttacttaata

SEQ ID NO: 7051 - DNA, 33 bp, homo sapiens
tctatgatctaggttgyaaataatttcccagtt

SEQ ID NO: 7052 - DNA, 33 bp, homo sapiens
taaagtatactgatacrcttgggtaatagagaa

SEQ ID NO: 7053 - DNA, 33 bp, homo sapiens
ctcagcggcttgcacgyagacttgctaggaaga

SEQ ID NO: 7054 - DNA, 33 bp, homo sapiens
ttcgttcagtcatgacraattaagtctgtattt

SEQ ID NO: 7055 - DNA, 33 bp, homo sapiens
tttggaagaggaattayatgagcctgttgccat

SEQ ID NO: 7056 - DNA, 33 bp, homo sapiens
tgaccagccttgtccartagaattataatgcaa

SEQ ID NO: 7057 - DNA, 33 bp, homo sapiens
ttttttgtgagtgacaygatctgaaaaatgtgc

SEQ ID NO: 7058 - DNA, 33 bp, homo sapiens
atttctcaaagctcgayggcagggaccctttag

SEQ ID NO: 7059 - DNA, 33 bp, homo sapiens
caacaaaaagaaacagsctacactttgggaagc

SEQ ID NO: 7060 - DNA, 33 bp, homo sapiens
gggactttgttagcttsaaataaatatatacgt

SEQ ID NO: 7061 - DNA, 33 bp, homo sapiens
acggaaaattggtaccrgggatcaataggatcc

SEQ ID NO: 7062 - DNA, 33 bp, homo sapiens
tgctgcattttatagaygggaaaactaaagcat

SEQ ID NO: 7063 - DNA, 33 bp, homo sapiens
agttcaggatggttcaratgtgtatggactgtt

SEQ ID NO: 7064 - DNA, 33 bp, homo sapiens
gcaggaattcaatagaycgcaaactgaaaagtc

SEQ ID NO: 7065 - DNA, 33 bp, homo sapiens
caaacactaacctatamccaatctgcctgtttc

SEQ ID NO: 7066 - DNA, 33 bp, homo sapiens
ccagagagattttttcmaaaagtagctggaaat

SEQ ID NO: 7067 - DNA, 33 bp, homo sapiens
agtaggagttgtccagsaggaaaaatccggggc

SEQ ID NO: 7068 - DNA, 33 bp, homo sapiens
ggaatatcctagtcagrattttggattattcgt

SEQ ID NO: 7069 - DNA, 33 bp, homo sapiens
gcaaaaacaccttaggsaagccatcgcctggca

SEQ ID NO: 7070 - DNA, 33 bp, homo sapiens
aagactactgggttatraaacagaagaggaaag

SEQ ID NO: 7071 - DNA, 33 bp, homo sapiens
taatcaacttgattccyctggtgctaaagggaa

SEQ ID NO: 7072 - DNA, 33 bp, homo sapiens
catatcttggtattagraaaagagaggaaagtg

SEQ ID NO: 7073 - DNA, 33 bp, homo sapiens
taacttcttagagttgraaaggctactagagag

SEQ ID NO: 7074 - DNA, 33 bp, homo sapiens
aagctcccacactataycttacactaaggccaa

SEQ ID NO: 7075 - DNA, 33 bp, homo sapiens
acagaaaaatgaaagcygagggtacctagagaa

SEQ ID NO: 7076 - DNA, 33 bp, homo sapiens
aatgtgggcagagtaayggattcttatcacctg

SEQ ID NO: 7077 - DNA, 33 bp, homo sapiens
ctcttcttccttttatsaaaagctgtgctcaat

SEQ ID NO: 7078 - DNA, 33 bp, homo sapiens
tggaagttccacattarggtgccagcagatttg

SEQ ID NO: 7079 - DNA, 33 bp, homo sapiens
cttttcttgatcactgyagctagagccttagca

SEQ ID NO: 7080 - DNA, 33 bp, homo sapiens
ctattgtcaaattacasaacactccaaagagaa

SEQ ID NO: 7081 - DNA, 33 bp, homo sapiens
caggtactgggtaatgkagtgtggaaaatcaag

SEQ ID NO: 7082 - DNA, 33 bp, homo sapiens
actctgaggcccaaagyacaccagacacagact

SEQ ID NO: 7083 - DNA, 33 bp, homo sapiens
agggtgacagcactggsagaacaaggcagcaga

SEQ ID NO: 7084 - DNA, 33 bp, homo sapiens
ggtatatagagaggcakatgtatagacaggtta

SEQ ID NO: 7085 - DNA, 33 bp, homo sapiens
ggcaggattccaggtamcaataccatcttggca

SEQ ID NO: 7086 - DNA, 33 bp, homo sapiens
gctttggggttttaaakcattaggaattcttct

SEQ ID NO: 7087 - DNA, 33 bp, homo sapiens
gtcttccttttttctgmagtacttttgaaggtg

SEQ ID NO: 7088 - DNA, 33 bp, homo sapiens
atataagcatcctgaaraagttcatgtaaaact

SEQ ID NO: 7089 - DNA, 33 bp, homo sapiens
ttttagagaatgtttasagcgatcatttcacat

SEQ ID NO: 7090 - DNA, 33 bp, homo sapiens
atgttaagaggaagagwaaatgtaacatgatgt

SEQ ID NO: 7091 - DNA, 33 bp, homo sapiens
tgatacactgaaaaggkaacactactatggtat

SEQ ID NO: 7092 - DNA, 33 bp, homo sapiens
tttgaaacactacacamacttgtctttcttgat

SEQ ID NO: 7093 - DNA, 33 bp, homo sapiens
gaaagcccatacctaamtcattccagcacacct

SEQ ID NO: 7094 - DNA, 33 bp, homo sapiens
aaatgattcatggtaasagtaaataaaatttgg

SEQ ID NO: 7095 - DNA, 33 bp, homo sapiens
gaaaaaaaaacagcagrctaatgtgaagcagag

SEQ ID NO: 7096 - DNA, 33 bp, homo sapiens
taatgattgagcatagsaagaaagaatttatca

SEQ ID NO: 7097 - DNA, 33 bp, homo sapiens
ccagcccagggttttcyatactacaatcatgac

SEQ ID NO: 7098 - DNA, 33 bp, homo sapiens
ttagctgagacgtcaasaaagagtagtatttag

SEQ ID NO: 7099 - DNA, 33 bp, homo sapiens
aagccattttcaaagtsaagttcagggtacctc

SEQ ID NO: 7100 - DNA, 33 bp, homo sapiens
attttagtacctaatgracgttaaaatagttct

SEQ ID NO: 7101 - DNA, 33 bp, homo sapiens
ttatcaagtccagtaaytctaagttggaatttg

SEQ ID NO: 7102 - DNA, 33 bp, homo sapiens
cgtaagaaaatagaagraacggactaatgtata

SEQ ID NO: 7103 - DNA, 33 bp, homo sapiens
gttgctaagcttcccamcatcgagatattcctt

SEQ ID NO: 7104 - DNA, 33 bp, homo sapiens
actttacaagatggtaycaaattattttcccaa

SEQ ID NO: 7105 - DNA, 33 bp, homo sapiens
aaggtcaggtagatacraacttcaaacaaacat

SEQ ID NO: 7106 - DNA, 33 bp, homo sapiens
caaatcagaatttggaygcattgacaggcttag

SEQ ID NO: 7107 - DNA, 33 bp, homo sapiens
tggcttctctatagacmactgttacattaggga

SEQ ID NO: 7108 - DNA, 33 bp, homo sapiens
aaagacataaaaagcaytgaatatagcaaacca

SEQ ID NO: 7109 - DNA, 33 bp, homo sapiens
agaaggcttgcaattaygaacctcagagcttat

SEQ ID NO: 7110 - DNA, 33 bp, homo sapiens
agaattagatgccaaaracaaaataacaaaaca

SEQ ID NO: 7111 - DNA, 33 bp, homo sapiens
gcagacctggaaaaatkaacagatctgatcagt

SEQ ID NO: 7112 - DNA, 33 bp, homo sapiens
tttagttagaactcagyagcatagtcattccta

SEQ ID NO: 7113 - DNA, 33 bp, homo sapiens
tgatgcttatattatgyagagatctgacaagtc

SEQ ID NO: 7114 - DNA, 33 bp, homo sapiens
aaagattcaaaggtcawtaaaattattcaagca

SEQ ID NO: 7115 - DNA, 33 bp, homo sapiens
aatttggtatatgataygagacacataaaatca

SEQ ID NO: 7116 - DNA, 33 bp, homo sapiens
tttatgagacagctagscaactctgaacacaat

SEQ ID NO: 7117 - DNA, 33 bp, homo sapiens
ggcttaatactccgacratgaaatattctgtac

SEQ ID NO: 7118 - DNA, 33 bp, homo sapiens
cccattataaagaaggracagcaaaaatattta

SEQ ID NO: 7119 - DNA, 33 bp, homo sapiens
tggtctgattcagttayacctttgtgtctggaa

SEQ ID NO: 7120 - DNA, 33 bp, homo sapiens
atgaggagtggtttgayaatgcaagccatgctc

SEQ ID NO: 7121 - DNA, 33 bp, homo sapiens
ctcatattgggttaagycattggcaagaagaaa

SEQ ID NO: 7122 - DNA, 33 bp, homo sapiens
actataactttggtacraggatcttactgtttc

SEQ ID NO: 7123 - DNA, 33 bp, homo sapiens
atctggctgcccaaaawtgattccttcctctta

SEQ ID NO: 7124 - DNA, 33 bp, homo sapiens
ctgtttacggccaatcycaattctcagaaataa

SEQ ID NO: 7125 - DNA, 33 bp, homo sapiens
acttgatcctcaaaaawaatggcttatagattc

SEQ ID NO: 7126 - DNA, 33 bp, homo sapiens
ttttatgtgctactctraaaaatggtatcctgg

SEQ ID NO: 7127 - DNA, 33 bp, homo sapiens
cagataaaaaatcgtgragaatgtatcatcaaa

SEQ ID NO: 7128 - DNA, 33 bp, homo sapiens
caacaacataaatttcyatacacaggaaactga

SEQ ID NO: 7129 - DNA, 33 bp, homo sapiens
tggtggccttcattacygggtagtgtgttcctt

SEQ ID NO: 7130 - DNA, 33 bp, homo sapiens
agcccctggctactackgatcaacttctatctc

SEQ ID NO: 7131 - DNA, 33 bp, homo sapiens
ggtaatatgtgtgaaaytgagccctgcatttta

SEQ ID NO: 7132 - DNA, 33 bp, homo sapiens
aaagatatatgtacacrcactacaataaatcct

SEQ ID NO: 7133 - DNA, 33 bp, homo sapiens
ccttcaaggaaacaaargagttgtagtatttct

SEQ ID NO: 7134 - DNA, 33 bp, homo sapiens
gaaattgtttttctgayagttggtaggttctat

SEQ ID NO: 7135 - DNA, 33 bp, homo sapiens
ggaggctaagaaaagasaaagatagtccaactt

SEQ ID NO: 7136 - DNA, 33 bp, homo sapiens
gtgatgccttggagctraaccaaacatttgaca

SEQ ID NO: 7137 - DNA, 33 bp, homo sapiens
taatgacaatttgaacygtgcaggctactgtga

SEQ ID NO: 7138 - DNA, 33 bp, homo sapiens
cccaaagacttgtccasgttcagttttacaagc

SEQ ID NO: 7139 - DNA, 33 bp, homo sapiens
agtgcctgaaacatagkagatcctcatattcag

SEQ ID NO: 7140 - DNA, 33 bp, homo sapiens
acagagaaagaggagamggtcattctaggtaaa

SEQ ID NO: 7141 - DNA, 33 bp, homo sapiens
tgtttgcgttccttgtyaataccagactctgcg

SEQ ID NO: 7142 - DNA, 33 bp, homo sapiens
gtacagtacggctcaaytggttactgctctgcg

SEQ ID NO: 7143 - DNA, 33 bp, homo sapiens
ttcccccacaaaaatayagaactgtaggcaata

SEQ ID NO: 7144 - DNA, 33 bp, homo sapiens
cacacaccgtctggtayactttaaatcatctct

SEQ ID NO: 7145 - DNA, 33 bp, homo sapiens
cctgacaatgaaaaaayggtttgttcagggatt

SEQ ID NO: 7146 - DNA, 33 bp, homo sapiens
cagtcctatgtacccastggaacatttcttcct

SEQ ID NO: 7147 - DNA, 33 bp, homo sapiens
tggtcacttttttcctyaaattacgatgtgcag

SEQ ID NO: 7148 - DNA, 33 bp, homo sapiens
aaagtaaattatatccrcacaagatgcttaatt

SEQ ID NO: 7149 - DNA, 33 bp, homo sapiens
aaatagagaagcaaaasagtataagaaacactg

SEQ ID NO: 7150 - DNA, 33 bp, homo sapiens
ttactattaataaataygcttacgattttcaga

SEQ ID NO: 7151 - DNA, 33 bp, homo sapiens
acaccataaattcttamatctaactatctccct

SEQ ID NO: 7152 - DNA, 33 bp, homo sapiens
tgacattgtagtgatamgaaaatgagatgcggg

SEQ ID NO: 7153 - DNA, 33 bp, homo sapiens
catttcccaaatgcctyagcggttgtcttaaca

SEQ ID NO: 7154 - DNA, 33 bp, homo sapiens
cttgtcctgcgtctctsagagaattttactttt

SEQ ID NO: 7155 - DNA, 33 bp, homo sapiens
gagtagcaaattgactyaggaaagaatggtgat

SEQ ID NO: 7156 - DNA, 33 bp, homo sapiens
tccttatgtgatatctkaagtccactttcttac

SEQ ID NO: 7157 - DNA, 33 bp, homo sapiens
aactccattaacacatkagagtgattcaaaaga

SEQ ID NO: 7158 - DNA, 33 bp, homo sapiens
atcctctgtgttctgamggcttaaatttttttg

SEQ ID NO: 7159 - DNA, 33 bp, homo sapiens
ttgtccttcaagcaggyagtctgatttctaagg

SEQ ID NO: 7160 - DNA, 33 bp, homo sapiens
gttaaggacttatccayggaatattttgtgaga

SEQ ID NO: 7161 - DNA, 33 bp, homo sapiens
cttattttgtgcagtgsaatggactcctgactt

SEQ ID NO: 7162 - DNA, 33 bp, homo sapiens
tatttccaggcattcayagactgtagtttctgc

SEQ ID NO: 7163 - DNA, 33 bp, homo sapiens
aaagtaccttgctccargtgtctttttctactg

SEQ ID NO: 7164 - DNA, 33 bp, homo sapiens
ttagccaggtgcagacrgaagaaacaacaatct

SEQ ID NO: 7165 - DNA, 33 bp, homo sapiens
gggacctttgggaaccyatcatcatgcttcctc

SEQ ID NO: 7166 - DNA, 33 bp, homo sapiens
gagattggagaggaaayggcccttgacacggaa

SEQ ID NO: 7167 - DNA, 33 bp, homo sapiens
caaattgtcttggcaaygcttttgcaaatctaa

SEQ ID NO: 7168 - DNA, 33 bp, homo sapiens
agggcagaggtgactayagaaaaaaggaccaag

SEQ ID NO: 7169 - DNA, 33 bp, homo sapiens
agacttcaaccccctaygtggcaagtccctgcc

SEQ ID NO: 7170 - DNA, 33 bp, homo sapiens
gctctaagcccctccasgacccttgctgtgctc

SEQ ID NO: 7171 - DNA, 33 bp, homo sapiens
gccactgaggtgggtgkaatgaagcccgtggga

SEQ ID NO: 7172 - DNA, 33 bp, homo sapiens
ttttttgctatgattgycaaacttcccggattg

SEQ ID NO: 7173 - DNA, 33 bp, homo sapiens
aggaaaagagcagaccracaggcaaacgtggag

SEQ ID NO: 7174 - DNA, 33 bp, homo sapiens
aagtaagatataaagcrcctactaagtgccaga

SEQ ID NO: 7175 - DNA, 33 bp, homo sapiens
cttgggcaaatggatgwagttctcaaatatttt

SEQ ID NO: 7176 - DNA, 33 bp, homo sapiens
tgagttaaatttgcacratctacagaaagggtt

SEQ ID NO: 7177 - DNA, 33 bp, homo sapiens
gaaggagcttggtgggmaaataggaaggattct

SEQ ID NO: 7178 - DNA, 33 bp, homo sapiens
cagttctgccaggaacrcaccaatgacaacaca

SEQ ID NO: 7179 - DNA, 33 bp, homo sapiens
ccagtcttccctttccraacttcagcctattgt

SEQ ID NO: 7180 - DNA, 33 bp, homo sapiens
atagggttgaaaacaastcaactaggtttcatt

SEQ ID NO: 7181 - DNA, 33 bp, homo sapiens
gcaccagctttgaggcractgtagcacatggtc

SEQ ID NO: 7182 - DNA, 33 bp, homo sapiens
gaggagtctagggtaaytgtggatatgattagc

SEQ ID NO: 7183 - DNA, 33 bp, homo sapiens
ttaacacaatatcacartaaaaattctcagact

SEQ ID NO: 7184 - DNA, 33 bp, homo sapiens
tcaaaattaaagcaaarggttgcaaattcattt

SEQ ID NO: 7185 - DNA, 33 bp, homo sapiens
ctattacgggtaacacyacacactttcttggat

SEQ ID NO: 7186 - DNA, 33 bp, homo sapiens
cctggggaagggtgacwattcagatatttggag

SEQ ID NO: 7187 - DNA, 33 bp, homo sapiens
actatttggggaaggcrgaatctgacatggtct

SEQ ID NO: 7188 - DNA, 33 bp, homo sapiens
tcatcttaatgagccayaaatgtgtaattagca

SEQ ID NO: 7189 - DNA, 33 bp, homo sapiens
caacacggaggctacaycaggaccaatcgcatt

SEQ ID NO: 7190 - DNA, 33 bp, homo sapiens
cttcctcatcactcacyggtcaatggatataag

SEQ ID NO: 7191 - DNA, 33 bp, homo sapiens
agcatgaataggactaygttcttttataccgtg

SEQ ID NO: 7192 - DNA, 33 bp, homo sapiens
gagctagtcagtcaaaygtgagaaactcatatg

SEQ ID NO: 7193 - DNA, 33 bp, homo sapiens
atctaaacaagaggtcraaagccgaaatgccta

SEQ ID NO: 7194 - DNA, 33 bp, homo sapiens
catttgtcaagcagaasatgagtttccaatctc

SEQ ID NO: 7195 - DNA, 33 bp, homo sapiens
ctaagcaatcaatttargacagaaaaagaggta

SEQ ID NO: 7196 - DNA, 33 bp, homo sapiens
agtttcctctgagctcmatttccattagtccaa

SEQ ID NO: 7197 - DNA, 33 bp, homo sapiens
atgtattgcaaataaamaaacatggaaaaatct

SEQ ID NO: 7198 - DNA, 33 bp, homo sapiens
tttgagatatgttctgkaaccaggttattttac

SEQ ID NO: 7199 - DNA, 33 bp, homo sapiens
ttggctgtagcttagayagcttggcctgcagag

SEQ ID NO: 7200 - DNA, 33 bp, homo sapiens
ctagttattaacatcayatctcagaatcataaa

SEQ ID NO: 7201 - DNA, 33 bp, homo sapiens
gctaccattaatgacaytcttcctactgaaata

SEQ ID NO: 7202 - DNA, 33 bp, homo sapiens
agatgttaatgcttacyaaattgatccagagat

SEQ ID NO: 7203 - DNA, 33 bp, homo sapiens
acttttgttgtcagaayaatccatcttcacagg

SEQ ID NO: 7204 - DNA, 33 bp, homo sapiens
tagtctagatgttgagraaggcctcgctaaatg

SEQ ID NO: 7205 - DNA, 33 bp, homo sapiens
aaacttcagtgacttamaacaaccaaggcttat

SEQ ID NO: 7206 - DNA, 33 bp, homo sapiens
aaatctctgttcacatraaagcctgtccatgaa

SEQ ID NO: 7207 - DNA, 33 bp, homo sapiens
acatagaaagcaggacractatttaacaggtat

SEQ ID NO: 7208 - DNA, 33 bp, homo sapiens
tgaaagaagccaaaacyactacccgtattccag

SEQ ID NO: 7209 - DNA, 33 bp, homo sapiens
gaaggaggagaagataygcagacaactgaaggg

SEQ ID NO: 7210 - DNA, 33 bp, homo sapiens
tgtagagtactaactcracaggattctgatctg

SEQ ID NO: 7211 - DNA, 33 bp, homo sapiens
tttcaaccttaactggraccctcatttctgttg

SEQ ID NO: 7212 - DNA, 33 bp, homo sapiens
aggcatcacattgttayctcaacattttcagaa

SEQ ID NO: 7213 - DNA, 33 bp, homo sapiens
gctggaagtatactacracaattttcactgcac

SEQ ID NO: 7214 - DNA, 33 bp, homo sapiens
agtagaacacagatacmaccattatctttgaag

SEQ ID NO: 7215 - DNA, 33 bp, homo sapiens
tagggcagatatgcaaygtaggtaaataagggg

SEQ ID NO: 7216 - DNA, 33 bp, homo sapiens
aacttcctgtttctccrcaaagattactgtcta

SEQ ID NO: 7217 - DNA, 33 bp, homo sapiens
tcagggctccctgaccsccaggtgcctattagg

SEQ ID NO: 7218 - DNA, 33 bp, homo sapiens
ttaggaatcaacctcaraaagattataatctga

SEQ ID NO: 7219 - DNA, 33 bp, homo sapiens
ctgtacttgaagtcaaygataacccaactggaa

SEQ ID NO: 7220 - DNA, 33 bp, homo sapiens
ctgttaaccgagtatcmaagatgctaagaaact

SEQ ID NO: 7221 - DNA, 33 bp, homo sapiens
gaatgtggaaatctaaytgatcggctaagtgtt

SEQ ID NO: 7222 - DNA, 33 bp, homo sapiens
ttatacctgtcatgcaratatacagaacccaga

SEQ ID NO: 7223 - DNA, 33 bp, homo sapiens
aacatgactgtcaaatyagagcatttattcagt

SEQ ID NO: 7224 - DNA, 33 bp, homo sapiens
ctttgaaatgtattctsaacaacaaaatcaatt

SEQ ID NO: 7225 - DNA, 33 bp, homo sapiens
agtgaaaacttagagcrcattcttagctaaatg

SEQ ID NO: 7226 - DNA, 33 bp, homo sapiens
gtaatagtcacaatccwgagtttgactttaatt

SEQ ID NO: 7227 - DNA, 33 bp, homo sapiens
actttgtcattgatggycagaagccagtaagca

SEQ ID NO: 7228 - DNA, 33 bp, homo sapiens
aagcgaattctacaccsacatgaaaaacatctc

SEQ ID NO: 7229 - DNA, 33 bp, homo sapiens
ttagtaatcatactacsaataagtgaaccaaac

SEQ ID NO: 7230 - DNA, 33 bp, homo sapiens
ttctctaattacgaaartaagcttatgacaact

SEQ ID NO: 7231 - DNA, 33 bp, homo sapiens
ctgtatattaaccataygttctgacaagagttc

SEQ ID NO: 7232 - DNA, 33 bp, homo sapiens
aaaagagagacgcatamaaacagagcatttatc

SEQ ID NO: 7233 - DNA, 33 bp, homo sapiens
aagttgctgagcagaargtgccacagtcatgtc

SEQ ID NO: 7234 - DNA, 33 bp, homo sapiens
aagcttggccttttcaygcagctgttgtttgtg

SEQ ID NO: 7235 - DNA, 33 bp, homo sapiens
acttgtactaaaatggycaaagcgtttacttac

SEQ ID NO: 7236 - DNA, 33 bp, homo sapiens
taacagacgcaggtaayggagagtgcctgctgg

SEQ ID NO: 7237 - DNA, 33 bp, homo sapiens
atggttttctgactgaygtgtagggtaacacaa

SEQ ID NO: 7238 - DNA, 33 bp, homo sapiens
tctttacatttcaggcmctgtgtattccaagtc

SEQ ID NO: 7239 - DNA, 33 bp, homo sapiens
gcctactaaacaacaayttctgagttaacaata

SEQ ID NO: 7240 - DNA, 33 bp, homo sapiens
ataacagaatggtaaamtgcaaactgaaatcat

SEQ ID NO: 7241 - DNA, 33 bp, homo sapiens
ttcagtcttttcattcragggtgatttacatca

SEQ ID NO: 7242 - DNA, 33 bp, homo sapiens
aattctattcatgtgaygagcggttaatacgtg

SEQ ID NO: 7243 - DNA, 33 bp, homo sapiens
tcttgcactgtgataastggctcatttaactta

SEQ ID NO: 7244 - DNA, 33 bp, homo sapiens
cttttctttgggaataygggtgatgattcttct

SEQ ID NO: 7245 - DNA, 33 bp, homo sapiens
atgaatgatctcgttayccaggtactgagcaca

SEQ ID NO: 7246 - DNA, 33 bp, homo sapiens
ttgttaatagattaaaragtggtcagcatggca

SEQ ID NO: 7247 - DNA, 33 bp, homo sapiens
aataatacattcaaaamaattttccatttcata

SEQ ID NO: 7248 - DNA, 33 bp, homo sapiens
tctttcacaatctaggrcaaagagtatgggata

SEQ ID NO: 7249 - DNA, 33 bp, homo sapiens
tgcctttcctcctgtarcttgcttttgctcatt

SEQ ID NO: 7250 - DNA, 33 bp, homo sapiens
gctttggatgattaaaracactcatgaagaagg

SEQ ID NO: 7251 - DNA, 33 bp, homo sapiens
aatggagtctgtcaaakcagatcatgtacacgg

SEQ ID NO: 7252 - DNA, 33 bp, homo sapiens
ccacatccactcacagkagcctaccacttctat

SEQ ID NO: 7253 - DNA, 33 bp, homo sapiens
tcactgcctgtgaaacraagcccttattctttg

SEQ ID NO: 7254 - DNA, 33 bp, homo sapiens
caccttgagggaagackgaaactaatatccatt

SEQ ID NO: 7255 - DNA, 33 bp, homo sapiens
gggatccatcctctaarcacataataaggtgcc

SEQ ID NO: 7256 - DNA, 33 bp, homo sapiens
ggactgggtagagataygggtagatttatgttg

SEQ ID NO: 7257 - DNA, 33 bp, homo sapiens
cttttcttgcttgaaartggaacccaaccaatt

SEQ ID NO: 7258 - DNA, 33 bp, homo sapiens
acagtttatgtcaaaartacaataaagtcagaa

SEQ ID NO: 7259 - DNA, 33 bp, homo sapiens
agttcaaataagaaaaragattgtgtgttttca

SEQ ID NO: 7260 - DNA, 33 bp, homo sapiens
gttaatttgctttcctktaccagacacctctga

SEQ ID NO: 7261 - DNA, 33 bp, homo sapiens
gtgctgaagagatgaawgtgtcttcttgtagca

SEQ ID NO: 7262 - DNA, 33 bp, homo sapiens
cccattataaatgtaayctgttgctttgttaac

SEQ ID NO: 7263 - DNA, 33 bp, homo sapiens
acataacagaattgcayagaactaccagcaaat

SEQ ID NO: 7264 - DNA, 33 bp, homo sapiens
ggttgcatactgaatgmcaaattaaaaatcagt

SEQ ID NO: 7265 - DNA, 33 bp, homo sapiens
aaaacctgtttagttasaggatagttgtggggg

SEQ ID NO: 7266 - DNA, 33 bp, homo sapiens
gaaagtatattaagcaktattcctgaggagaaa

SEQ ID NO: 7267 - DNA, 33 bp, homo sapiens
atcaccatcaaccctcwaagcaaatccctccat

SEQ ID NO: 7268 - DNA, 33 bp, homo sapiens
aaggtaatttcaagcasagaattgttccaccat

SEQ ID NO: 7269 - DNA, 33 bp, homo sapiens
cactggcctggaactgsaacctgataaccaaag

SEQ ID NO: 7270 - DNA, 33 bp, homo sapiens
ttcagttgcaaaaaccrggattggtgccttcca

SEQ ID NO: 7271 - DNA, 33 bp, homo sapiens
attaagctggtgtaaamcacttttcccactccc

SEQ ID NO: 7272 - DNA, 33 bp, homo sapiens
ttttggataaatctacraagaggtgatataaaa

SEQ ID NO: 7273 - DNA, 33 bp, homo sapiens
gcctttgaatgtaggayggaattaagttaaata

SEQ ID NO: 7274 - DNA, 33 bp, homo sapiens
cacacatcaaacatacyggggaagagatgccag

SEQ ID NO: 7275 - DNA, 33 bp, homo sapiens
cttttgtcctctttcayagtagacaggcttgac

SEQ ID NO: 7276 - DNA, 33 bp, homo sapiens
aagctaatcagcaaaastgcttataggagactc

SEQ ID NO: 7277 - DNA, 33 bp, homo sapiens
gtccatactgtccaaawtgatacacaaattcaa

SEQ ID NO: 7278 - DNA, 33 bp, homo sapiens
attattaagccttgaawatggttgtcctgtcat

SEQ ID NO: 7279 - DNA, 33 bp, homo sapiens
cctagagaatctggagwatgtaattacaatttc

SEQ ID NO: 7280 - DNA, 33 bp, homo sapiens
gtgtgaggtaagttacyaacattcattaaaagc

SEQ ID NO: 7281 - DNA, 33 bp, homo sapiens
caaatgctagaactccraatagttttaatttca

SEQ ID NO: 7282 - DNA, 33 bp, homo sapiens
cttcttgttctgccaayacattgtggagatacc

SEQ ID NO: 7283 - DNA, 33 bp, homo sapiens
aattatacaatgtcaargttggaagtgttaccc

SEQ ID NO: 7284 - DNA, 33 bp, homo sapiens
ctcagtagagatacaartaaggtctgtccagta

SEQ ID NO: 7285 - DNA, 33 bp, homo sapiens
tctgttgacacagctgrataatataagacagaa

SEQ ID NO: 7286 - DNA, 33 bp, homo sapiens
tacttggttccaggtcscaaatgagcggggagg

SEQ ID NO: 7287 - DNA, 33 bp, homo sapiens
aggaaattctatgctgyatatctgaccacaatt

SEQ ID NO: 7288 - DNA, 33 bp, homo sapiens
tgtgtgctcttcacaakcaaaagcaaagcaaaa

SEQ ID NO: 7289 - DNA, 33 bp, homo sapiens
aattattgggctattayagttctgagagctgag

SEQ ID NO: 7290 - DNA, 33 bp, homo sapiens
tgagggactctgataawcgtctgtttcttttat

SEQ ID NO: 7291 - DNA, 33 bp, homo sapiens
gccttgttatgtagacraaaactcttaggttaa

SEQ ID NO: 7292 - DNA, 33 bp, homo sapiens
ccatgtatattcagaartgtgatagtttctttt

SEQ ID NO: 7293 - DNA, 33 bp, homo sapiens
ccagctgtgggggcaaygaggtccggccaaatc

SEQ ID NO: 7294 - DNA, 33 bp, homo sapiens
gagacctataatgaaawgcaaaatattcacaga

SEQ ID NO: 7295 - DNA, 33 bp, homo sapiens
cttgttaatgggagtayatggtctgttttatgg

SEQ ID NO: 7296 - DNA, 33 bp, homo sapiens
tgctgagacacccacastaggaaaaacctcttc

SEQ ID NO: 7297 - DNA, 33 bp, homo sapiens
aaactaacggactaccracatgctactgtttct

SEQ ID NO: 7298 - DNA, 33 bp, homo sapiens
gaaaagtgctacatacwacagtaaccaaaacaa

SEQ ID NO: 7299 - DNA, 33 bp, homo sapiens
atccacagacccctctyaatcttctggttctag

SEQ ID NO: 7300 - DNA, 33 bp, homo sapiens
ggtccacaattgcgtcygacccaacactgcttt

SEQ ID NO: 7301 - DNA, 33 bp, homo sapiens
tcaacggcatggtgacmagtacactctaattcc

SEQ ID NO: 7302 - DNA, 33 bp, homo sapiens
gtctggccaagtgccamaacggaaaagttgcca

SEQ ID NO: 7303 - DNA, 33 bp, homo sapiens
acatgctcaggaataargtcatgctctatttcc

SEQ ID NO: 7304 - DNA, 33 bp, homo sapiens
caagaaacagccaataytaacatcattctccaa

SEQ ID NO: 7305 - DNA, 33 bp, homo sapiens
ccttagatgaagactawacttctgcatttgaga

SEQ ID NO: 7306 - DNA, 33 bp, homo sapiens
tccacataggaccagaycaagctcttgtagccc

SEQ ID NO: 7307 - DNA, 33 bp, homo sapiens
cattcatttctcagaamccaaaaggcgccatct

SEQ ID NO: 7308 - DNA, 33 bp, homo sapiens
ccaattcagataatcamctttcacagcacacca

SEQ ID NO: 7309 - DNA, 33 bp, homo sapiens
aataactttgcaagaaraaaaggatcaccatag

SEQ ID NO: 7310 - DNA, 33 bp, homo sapiens
gagtaggcacttcctarcctatgaaagcagggg

SEQ ID NO: 7311 - DNA, 33 bp, homo sapiens
agaagtcaagttccaayggcattgaggttcata

SEQ ID NO: 7312 - DNA, 33 bp, homo sapiens
aggccctcataatgctyagacttttctccatac

SEQ ID NO: 7313 - DNA, 33 bp, homo sapiens
ctattgatacgtgctayaacatggatcaatatt

SEQ ID NO: 7314 - DNA, 33 bp, homo sapiens
aaccacagccacacaaratggtgtacttaaatg

SEQ ID NO: 7315 - DNA, 33 bp, homo sapiens
atagctagttaaaacartaagtatcatctaatt

SEQ ID NO: 7316 - DNA, 33 bp, homo sapiens
attagtgccagacaacrctgtgggattgtcaac

SEQ ID NO: 7317 - DNA, 33 bp, homo sapiens
cattgctgtgtgtccamtcttagagcattgttc

SEQ ID NO: 7318 - DNA, 33 bp, homo sapiens
ttgcagctggcagtctraatcctatgagtaaat

SEQ ID NO: 7319 - DNA, 33 bp, homo sapiens
acaactaaaagccaagsagacagtagaagccct

SEQ ID NO: 7320 - DNA, 33 bp, homo sapiens
catggaagaaataaccrgatgtgtgattatata

SEQ ID NO: 7321 - DNA, 33 bp, homo sapiens
agcaacaagctttaaaktataatgaggttaagt

SEQ ID NO: 7322 - DNA, 33 bp, homo sapiens
tctttagatacttcaaygtggttcagtacaagc

SEQ ID NO: 7323 - DNA, 33 bp, homo sapiens
cttctgctcttcttggyattcaaagcctgctaa

SEQ ID NO: 7324 - DNA, 33 bp, homo sapiens
aaggcagaatttcagayggatgaactagtgaag

SEQ ID NO: 7325 - DNA, 33 bp, homo sapiens
tataaggctacatcaamgtataggacaaatttg

SEQ ID NO: 7326 - DNA, 33 bp, homo sapiens
aacatgagactttgtgrataggaaaggtcacat

SEQ ID NO: 7327 - DNA, 33 bp, homo sapiens
gaaaacaatatagacartcaaagggtcaaaaaa

SEQ ID NO: 7328 - DNA, 33 bp, homo sapiens
attctagatcataacaytggagaaacccttcta

SEQ ID NO: 7329 - DNA, 33 bp, homo sapiens
agtcgaaaccaaagaasaatagacagcaacctg

SEQ ID NO: 7330 - DNA, 33 bp, homo sapiens
gtgatgctagtaaatcycagaaaatgcttgatg

SEQ ID NO: 7331 - DNA, 33 bp, homo sapiens
tgtgtagctgaagcaayatgaagcaaaaagaac

SEQ ID NO: 7332 - DNA, 33 bp, homo sapiens
ctataaatttgctccargatttgcagtaaaaca

SEQ ID NO: 7333 - DNA, 33 bp, homo sapiens
taggcagttagatatakattctctggagttcgg

SEQ ID NO: 7334 - DNA, 33 bp, homo sapiens
ctgttcacaggttaaaygaaagtgacagttatg

SEQ ID NO: 7335 - DNA, 33 bp, homo sapiens
agtcactgctgtacacmaacatttctggtgaga

SEQ ID NO: 7336 - DNA, 33 bp, homo sapiens
ccatggttcataatgcyatcgtctcttgcctaa

SEQ ID NO: 7337 - DNA, 33 bp, homo sapiens
agatcagtgaaattaamagtgtggcaatgaaaa

SEQ ID NO: 7338 - DNA, 33 bp, homo sapiens
agactttcataagccartgaggtttacacagag

SEQ ID NO: 7339 - DNA, 33 bp, homo sapiens
gaactgaggcgccctcyctgtgaagtctgtgtt

SEQ ID NO: 7340 - DNA, 33 bp, homo sapiens
atacaaaattgccatascttttttctcgggctt

SEQ ID NO: 7341 - DNA, 33 bp, homo sapiens
accaacaaatcacaacracaagcagcattaaaa

SEQ ID NO: 7342 - DNA, 33 bp, homo sapiens
ggctaaaattaagaacrgtgacagcagcagttg

SEQ ID NO: 7343 - DNA, 33 bp, homo sapiens
catatacacgagtcagscattaaaaataggctc

SEQ ID NO: 7344 - DNA, 33 bp, homo sapiens
ttaatgggtggtaaatsaagaccttttgaatat

SEQ ID NO: 7345 - DNA, 33 bp, homo sapiens
ctagcagagaagatcartattaagataactggt

SEQ ID NO: 7346 - DNA, 33 bp, homo sapiens
tgtggttcctctcacaractgaaataatctctg

SEQ ID NO: 7347 - DNA, 33 bp, homo sapiens
tgggaaataagagaaargcaggccaggtcagag

SEQ ID NO: 7348 - DNA, 33 bp, homo sapiens
tctctggacactgtccsggaaactcttctgggg

SEQ ID NO: 7349 - DNA, 33 bp, homo sapiens
aactcctttgttcaaayatctagttatcataga

SEQ ID NO: 7350 - DNA, 33 bp, homo sapiens
attctttaaggccaaayctgaatgtcactttat

SEQ ID NO: 7351 - DNA, 33 bp, homo sapiens
tgagcagtcagtggaaygtgtgcacacctgtag

SEQ ID NO: 7352 - DNA, 33 bp, homo sapiens
tgtcatttgcagtgccrccttaggcaatcgact

SEQ ID NO: 7353 - DNA, 33 bp, homo sapiens
caatagcctaaacacarccatccatgtttcatg

SEQ ID NO: 7354 - DNA, 33 bp, homo sapiens
ttcttaggtgatcccakgttcgcaagtgctcag

SEQ ID NO: 7355 - DNA, 33 bp, homo sapiens
aattggatatccatacrgaagaaagctagcatc

SEQ ID NO: 7356 - DNA, 33 bp, homo sapiens
ctcatccagaatctaascacattttgctctgtt

SEQ ID NO: 7357 - DNA, 33 bp, homo sapiens
aactgatatttgaagamagaactgactcaatcg

SEQ ID NO: 7358 - DNA, 33 bp, homo sapiens
ctatacgtggctgtacmaatttatagtagtccc

SEQ ID NO: 7359 - DNA, 33 bp, homo sapiens
gatatattaaggaaatwagctcttggcgatgtg

SEQ ID NO: 7360 - DNA, 33 bp, homo sapiens
ttttatgaattttgtargcattcctagacaaat

SEQ ID NO: 7361 - DNA, 33 bp, homo sapiens
catgaagcttaagtcasacatttatccagtaac

SEQ ID NO: 7362 - DNA, 33 bp, homo sapiens
actcttcccactttaaycatcccatgtttctgc

SEQ ID NO: 7363 - DNA, 33 bp, homo sapiens
caaggccaggggtacayggtaacaccggttcat

SEQ ID NO: 7364 - DNA, 33 bp, homo sapiens
ttccctggttccctaaygctcaagtctagcccc

SEQ ID NO: 7365 - DNA, 33 bp, homo sapiens
tttaaaattcctgggcratagtcccatgcctga

SEQ ID NO: 7366 - DNA, 33 bp, homo sapiens
actgtccaaagggaagsagattacattgatgtt

SEQ ID NO: 7367 - DNA, 33 bp, homo sapiens
caggatgaagggaaaamcaaggtgccttcagaa

SEQ ID NO: 7368 - DNA, 33 bp, homo sapiens
agctcatattttccaarccttccttttgcttta

SEQ ID NO: 7369 - DNA, 33 bp, homo sapiens
gtctgtctccactaggwatctgatgatcctcta

SEQ ID NO: 7370 - DNA, 33 bp, homo sapiens
agtgtttggtgatttayctaagatgcatttcta

SEQ ID NO: 7371 - DNA, 33 bp, homo sapiens
ctcgtctctctttacaygtcaggcttctctttc

SEQ ID NO: 7372 - DNA, 33 bp, homo sapiens
gacctggaaacccatcraggcttctttttgcta

SEQ ID NO: 7373 - DNA, 33 bp, homo sapiens
gctcaatagcacataakgtctgtgagggcccag

SEQ ID NO: 7374 - DNA, 33 bp, homo sapiens
ttcacccttgcactgayagtctaatcttttacg

SEQ ID NO: 7375 - DNA, 33 bp, homo sapiens
cacattgtattgcctayaaagggaaaaatctta

SEQ ID NO: 7376 - DNA, 33 bp, homo sapiens
gagctcttcatgccaaraccagggaaaagggca

SEQ ID NO: 7377 - DNA, 33 bp, homo sapiens
actgatttgcaccttaragaaggatgtaaaagt

SEQ ID NO: 7378 - DNA, 33 bp, homo sapiens
aaaagggcatacgttayaatctgtcatgtctgc

SEQ ID NO: 7379 - DNA, 33 bp, homo sapiens
tggatcccagactggcrcatcttaccactctgg

SEQ ID NO: 7380 - DNA, 33 bp, homo sapiens
tacattcaagagaatamgacatgtcctttgaca

SEQ ID NO: 7381 - DNA, 33 bp, homo sapiens
agtttctaacttggtcyccaaattgcttattga

SEQ ID NO: 7382 - DNA, 33 bp, homo sapiens
ttgacaagacaaaggcragtggctctatcttta

SEQ ID NO: 7383 - DNA, 33 bp, homo sapiens
tgccacatacagaaaawtattattctcatattt

SEQ ID NO: 7384 - DNA, 33 bp, homo sapiens
ggaattgttggctgacrggagttttttgattat

SEQ ID NO: 7385 - DNA, 33 bp, homo sapiens
tcatgatcatgtgtggraggtttcatagggggc

SEQ ID NO: 7386 - DNA, 33 bp, homo sapiens
acaatggagttactgayggataccaactgaaat

SEQ ID NO: 7387 - DNA, 33 bp, homo sapiens
ctgtggtgaagaaagamacccacatacctaaca

SEQ ID NO: 7388 - DNA, 33 bp, homo sapiens
attacattgccactacyctatctattgtcatca

SEQ ID NO: 7389 - DNA, 33 bp, homo sapiens
accacatgggcagtgaygtctttacttgtggtc

SEQ ID NO: 7390 - DNA, 33 bp, homo sapiens
aatcattaaaacttaartctccaaaatgatcca

SEQ ID NO: 7391 - DNA, 33 bp, homo sapiens
atctcagtttgcctagkaagctgttgcctgaat

SEQ ID NO: 7392 - DNA, 33 bp, homo sapiens
gaaatgccatgcaagargtaaaaagtttgagaa

SEQ ID NO: 7393 - DNA, 33 bp, homo sapiens
gaccttaacatggaggrattgtcctaagttgtc

SEQ ID NO: 7394 - DNA, 33 bp, homo sapiens
gctcggcttctatacastcttttgagcaccctc

SEQ ID NO: 7395 - DNA, 33 bp, homo sapiens
ttgaggttgatattagrataagaggtgtctgtg

SEQ ID NO: 7396 - DNA, 33 bp, homo sapiens
tcgatatccttattgcyatttcccttacttaat

SEQ ID NO: 7397 - DNA, 33 bp, homo sapiens
ggttttgtcattatcartatttgcttccctgaa

SEQ ID NO: 7398 - DNA, 33 bp, homo sapiens
gtaaaatgtctctaaasacctgcaaaaccctat

SEQ ID NO: 7399 - DNA, 33 bp, homo sapiens
aaatatgtaagaagaamcttgagacttactgcc

SEQ ID NO: 7400 - DNA, 33 bp, homo sapiens
cctaattagaaaaaggraatggtcattgcagtg

SEQ ID NO: 7401 - DNA, 33 bp, homo sapiens
aactgccaccccattcyaagtgtccatagtcct

SEQ ID NO: 7402 - DNA, 33 bp, homo sapiens
tttgctttaatggctayagaaagaaggtggttt

SEQ ID NO: 7403 - DNA, 33 bp, homo sapiens
ttatttttttctagccrgagataacgtataatc

SEQ ID NO: 7404 - DNA, 33 bp, homo sapiens
attatcacaagttacayctttatatgtgtgtgc

SEQ ID NO: 7405 - DNA, 33 bp, homo sapiens
ctgtgatgctcacacartggaactgcctaagga

SEQ ID NO: 7406 - DNA, 33 bp, homo sapiens
ggtcaccatgcaccagsagagtgaactcaaatt

SEQ ID NO: 7407 - DNA, 33 bp, homo sapiens
atgggctcagtggatcrcagccttgaagcatga

SEQ ID NO: 7408 - DNA, 33 bp, homo sapiens
ccatccttggagaagcrgataaacaaaatgtca

SEQ ID NO: 7409 - DNA, 33 bp, homo sapiens
gagagtagttttaaacrgttaggcatagaagca

SEQ ID NO: 7410 - DNA, 33 bp, homo sapiens
caccaggtaaggtagasagagactgagtgaaaa

SEQ ID NO: 7411 - DNA, 33 bp, homo sapiens
ccacaactctgctttaygttccttgtactcaaa

SEQ ID NO: 7412 - DNA, 33 bp, homo sapiens
accatgaaaaacgatasacagctcctaatacac

SEQ ID NO: 7413 - DNA, 33 bp, homo sapiens
ttacttattgttgtgaygctaggcaagtcagtt

SEQ ID NO: 7414 - DNA, 33 bp, homo sapiens
aatcaacaggccaaaamgggagttacagtctag

SEQ ID NO: 7415 - DNA, 33 bp, homo sapiens
gtacagggattgaacayctccagccaaaggagg

SEQ ID NO: 7416 - DNA, 33 bp, homo sapiens
acacagaaataagaaayaggctcaactattggc

SEQ ID NO: 7417 - DNA, 33 bp, homo sapiens
tttcaacaaaaatatcmaaggcaaaaacacagc

SEQ ID NO: 7418 - DNA, 33 bp, homo sapiens
ccctgggccacaatggyagaagaagaattgtct

SEQ ID NO: 7419 - DNA, 33 bp, homo sapiens
ctgtacctttataacargtcttgaaatcaggga

SEQ ID NO: 7420 - DNA, 33 bp, homo sapiens
ttttacttcaaagcacrgtcatgttttatagag

SEQ ID NO: 7421 - DNA, 33 bp, homo sapiens
aaggaagtagagatacwgcttccatttcttgac

SEQ ID NO: 7422 - DNA, 33 bp, homo sapiens
ttgatctttcttgatasagatcagttgcccagt

SEQ ID NO: 7423 - DNA, 33 bp, homo sapiens
caaaaacatggtagtgsaggaaactgctaaggg

SEQ ID NO: 7424 - DNA, 33 bp, homo sapiens
gaggaaaataattagarggccagataatcaatt

SEQ ID NO: 7425 - DNA, 33 bp, homo sapiens
tggactcccggatttamagaatgacatacgtta

SEQ ID NO: 7426 - DNA, 33 bp, homo sapiens
cttcccatggttttgckaaccgtgtacctcagc

SEQ ID NO: 7427 - DNA, 33 bp, homo sapiens
atgcatccacctagcamccaattcttgatttct

SEQ ID NO: 7428 - DNA, 33 bp, homo sapiens
tagtggagcagtctgakcacatttggtttaaag

SEQ ID NO: 7429 - DNA, 33 bp, homo sapiens
gcatagctactgtagcragatggcccttgaaaa

SEQ ID NO: 7430 - DNA, 33 bp, homo sapiens
atagtcacagatacgartcaaatactttcctga

SEQ ID NO: 7431 - DNA, 33 bp, homo sapiens
taccgcttatggcaggmaagttaaaggaggctt

SEQ ID NO: 7432 - DNA, 33 bp, homo sapiens
gaagcctacttccaaaygccacagctggaacca

SEQ ID NO: 7433 - DNA, 33 bp, homo sapiens
tggtgaataaagaggaycaacttaaggggctgg

SEQ ID NO: 7434 - DNA, 33 bp, homo sapiens
tgctgctccctgtgtaraacatcaaggatatga

SEQ ID NO: 7435 - DNA, 33 bp, homo sapiens
ccctctctgcagcaggraactattctctttctt

SEQ ID NO: 7436 - DNA, 33 bp, homo sapiens
ggaggtgattggtaaargaatgcttcaggagga

SEQ ID NO: 7437 - DNA, 33 bp, homo sapiens
agaaaaactggggtcayagaagaagagataata

SEQ ID NO: 7438 - DNA, 33 bp, homo sapiens
tacatgcaagtaaatamgacttggacatgagcc

SEQ ID NO: 7439 - DNA, 33 bp, homo sapiens
tttttcttggacatcaytactttgttttgcgtt

SEQ ID NO: 7440 - DNA, 33 bp, homo sapiens
tcaacagcttttgtaartaataataatccatgt

SEQ ID NO: 7441 - DNA, 33 bp, homo sapiens
ctttgatcaacatgcamcaaatacgaaaataaa

SEQ ID NO: 7442 - DNA, 33 bp, homo sapiens
catgaggaatctctgaygtgaaggttctaaagg

SEQ ID NO: 7443 - DNA, 33 bp, homo sapiens
aagtagaacagaaggarggaaggtcatacaaac

SEQ ID NO: 7444 - DNA, 33 bp, homo sapiens
gtttcttaaagtcatartatactacagctagaa

SEQ ID NO: 7445 - DNA, 33 bp, homo sapiens
aacttaaggactaaaayggcagttagtgaggct

SEQ ID NO: 7446 - DNA, 33 bp, homo sapiens
atgtagtggtatcttawcacggtcttgatttgc

SEQ ID NO: 7447 - DNA, 33 bp, homo sapiens
cgtcattatgcttttarggtgttacatataaat

SEQ ID NO: 7448 - DNA, 33 bp, homo sapiens
agaatatagtctagaawttcatgtagcaatata

SEQ ID NO: 7449 - DNA, 33 bp, homo sapiens
ggtgggtaaaatgaccrattctgtctccttagc

SEQ ID NO: 7450 - DNA, 33 bp, homo sapiens
aaaatagccaaaaacartctgaggcaggggcag

SEQ ID NO: 7451 - DNA, 33 bp, homo sapiens
atgtgatatgctcttakagtaattatgacattg

SEQ ID NO: 7452 - DNA, 33 bp, homo sapiens
tgattaccatcataatragactataacactgct

SEQ ID NO: 7453 - DNA, 33 bp, homo sapiens
tccagtttaaagctccracttatagtcaatttg

SEQ ID NO: 7454 - DNA, 33 bp, homo sapiens
taattgtagggaggagraacttttcaggaatca

SEQ ID NO: 7455 - DNA, 33 bp, homo sapiens
ggaataaagctgacacygagacatgaaaattat

SEQ ID NO: 7456 - DNA, 33 bp, homo sapiens
aagcccaggatttatgmaagaacaagaactgtg

SEQ ID NO: 7457 - DNA, 33 bp, homo sapiens
tcacctgttagaaccaraaatgtcagcatgggg

SEQ ID NO: 7458 - DNA, 33 bp, homo sapiens
caacctgtatttgaaawtcgtattatctgcaaa

SEQ ID NO: 7459 - DNA, 33 bp, homo sapiens
tctttgagatgctcatractttccaaagaaaca

SEQ ID NO: 7460 - DNA, 33 bp, homo sapiens
aactacaacctccaaawgatatatagcagcagt

SEQ ID NO: 7461 - DNA, 33 bp, homo sapiens
gtacaaatagtcagtcwagtgaaataatacaaa

SEQ ID NO: 7462 - DNA, 33 bp, homo sapiens
atcatagtagttaatartatgcacatgaatatt

SEQ ID NO: 7463 - DNA, 33 bp, homo sapiens
gtctgtacagaacagartctagctggaggcatt

SEQ ID NO: 7464 - DNA, 33 bp, homo sapiens
ctatgtacgggcacaayccattttaaatatcca

SEQ ID NO: 7465 - DNA, 33 bp, homo sapiens
ttgagacctggcataakgtcatatacctcggga

SEQ ID NO: 7466 - DNA, 33 bp, homo sapiens
aaaggaccattcaaagraccatgtcaaatctga

SEQ ID NO: 7467 - DNA, 33 bp, homo sapiens
aatcttttgaacactasaaagtttctcacatat

SEQ ID NO: 7468 - DNA, 33 bp, homo sapiens
aattggttacttgagargaagattaatcagatg

SEQ ID NO: 7469 - DNA, 33 bp, homo sapiens
ttcttatgtgtcaccargtatttttttatttgg

SEQ ID NO: 7470 - DNA, 33 bp, homo sapiens
atagaaagatggaagcractgtatgggatcctc

SEQ ID NO: 7471 - DNA, 33 bp, homo sapiens
gaataactttacagtasagaaacctgagaaacc

SEQ ID NO: 7472 - DNA, 33 bp, homo sapiens
aaagctggagccttcayagtgcttgatttcaaa

SEQ ID NO: 7473 - DNA, 33 bp, homo sapiens
tgtacaaagatgccacmaatcagagcccacggg

SEQ ID NO: 7474 - DNA, 33 bp, homo sapiens
gaaggagattgcatgaycgttttatagaaggat

SEQ ID NO: 7475 - DNA, 33 bp, homo sapiens
aaaagcaaacctaaaamacaaatgtagctatct

SEQ ID NO: 7476 - DNA, 33 bp, homo sapiens
tcctcagatttaaacaygttgcgctcaaggtgc

SEQ ID NO: 7477 - DNA, 33 bp, homo sapiens
gtaaggaaggaaaggcragcaggtggttactgg

SEQ ID NO: 7478 - DNA, 33 bp, homo sapiens
tttcacttgccaaataygtcatttaacctctct

SEQ ID NO: 7479 - DNA, 33 bp, homo sapiens
ttaaaacagttggcaawacttgactgggtctga

SEQ ID NO: 7480 - DNA, 33 bp, homo sapiens
ctcaagagcatcatcarggcagtactaagtttt

SEQ ID NO: 7481 - DNA, 33 bp, homo sapiens
ttatacaatggaataaygcacaacaatgaggat

SEQ ID NO: 7482 - DNA, 33 bp, homo sapiens
gtgtgctcaccagacaytggatgtgccagcacc

SEQ ID NO: 7483 - DNA, 33 bp, homo sapiens
aagaatcaaattaaaastcgggtaatttcatac

SEQ ID NO: 7484 - DNA, 33 bp, homo sapiens
ggcttcatatatgtcamccctctgtgtttttaa

SEQ ID NO: 7485 - DNA, 33 bp, homo sapiens
agaaaagcaggagaaastcacagaatcacttac

SEQ ID NO: 7486 - DNA, 33 bp, homo sapiens
gagctgatgaccagccraggctaacatattaca

SEQ ID NO: 7487 - DNA, 33 bp, homo sapiens
gcatttaaatactaacrgtgaatggccaattct

SEQ ID NO: 7488 - DNA, 33 bp, homo sapiens
ggcttatttctcttaayataaagttctccagtg

SEQ ID NO: 7489 - DNA, 33 bp, homo sapiens
tattaagaattaggtamcagtagtattcttgtt

SEQ ID NO: 7490 - DNA, 33 bp, homo sapiens
taaggtctctggaaaasctcagattacctcact

SEQ ID NO: 7491 - DNA, 33 bp, homo sapiens
tccagatagaaaggaartgaactatgtgcctac

SEQ ID NO: 7492 - DNA, 33 bp, homo sapiens
agtgattggacttgaaycttcagatcccttcca

SEQ ID NO: 7493 - DNA, 33 bp, homo sapiens
aaggaaacagattaacmcagaagtcccatacct

SEQ ID NO: 7494 - DNA, 33 bp, homo sapiens
cattcaaaacaattcartcctctaaatgcaaac

SEQ ID NO: 7495 - DNA, 33 bp, homo sapiens
tgtctcaatctttatawctctgatgctcaataa

SEQ ID NO: 7496 - DNA, 33 bp, homo sapiens
ttagcactagaactatyagcttagaggggatgg

SEQ ID NO: 7497 - DNA, 33 bp, homo sapiens
taaagttacagctttcmataaggacactgttag

SEQ ID NO: 7498 - DNA, 33 bp, homo sapiens
tgtttaatggctcgaasctcagatcatttcttt

SEQ ID NO: 7499 - DNA, 33 bp, homo sapiens
cagcagcaatcaaagamtcccattggaaagata

SEQ ID NO: 7500 - DNA, 33 bp, homo sapiens
aatatggaatgccaagwcacaagtagaaaagtt

SEQ ID NO: 7501 - DNA, 33 bp, homo sapiens
atgttacctagaaaatraaatgcagggttataa

SEQ ID NO: 7502 - DNA, 33 bp, homo sapiens
gggcctcatgctggtaratgtttaaaccactgg

SEQ ID NO: 7503 - DNA, 33 bp, homo sapiens
tgaaaccaacagaggaraaaacgagattaatgt

SEQ ID NO: 7504 - DNA, 33 bp, homo sapiens
tatgggagaaggttaamctatgagtcctcaagt

SEQ ID NO: 7505 - DNA, 33 bp, homo sapiens
aaagctattaagtttcyagagggctatattgac

SEQ ID NO: 7506 - DNA, 33 bp, homo sapiens
actggcaattagagaarctcttagaagtaggag

SEQ ID NO: 7507 - DNA, 33 bp, homo sapiens
ctgaggtagttagagaytcaaactgaaacatag

SEQ ID NO: 7508 - DNA, 33 bp, homo sapiens
ttaaattcaggagttcratagaaaatatctaaa

SEQ ID NO: 7509 - DNA, 33 bp, homo sapiens
ttgataaatggtaacartgagcttggaataaga

SEQ ID NO: 7510 - DNA, 33 bp, homo sapiens
aagcatgagctccagarcaaaattatttagttc

SEQ ID NO: 7511 - DNA, 33 bp, homo sapiens
tagccaataaacccaaytgagaggtgcttaagt

SEQ ID NO: 7512 - DNA, 33 bp, homo sapiens
ttcaataggatattaaytgctgcattgtagggt

SEQ ID NO: 7513 - DNA, 33 bp, homo sapiens
tcctcaatgctccaacktggtcttctcatgtca

SEQ ID NO: 7514 - DNA, 33 bp, homo sapiens
gagtgagaaaaccagartagtacaggaatttga

SEQ ID NO: 7515 - DNA, 33 bp, homo sapiens
gccctcattacttttayaggttcccagaactgg

SEQ ID NO: 7516 - DNA, 33 bp, homo sapiens
tactgcaatattggcakgattgactctcccttc

SEQ ID NO: 7517 - DNA, 33 bp, homo sapiens
taatagcaatgctttayggttttagagtatttg

SEQ ID NO: 7518 - DNA, 33 bp, homo sapiens
catatgggttacattamgatttcacaacaaaat

SEQ ID NO: 7519 - DNA, 33 bp, homo sapiens
ctttcttgtcattaaawatcctcctgattgagg

SEQ ID NO: 7520 - DNA, 33 bp, homo sapiens
gttgaaagatgaataaragaattcctttgctaa

SEQ ID NO: 7521 - DNA, 33 bp, homo sapiens
taaccttaattgcatayatgagtgtgtgtgtaa

SEQ ID NO: 7522 - DNA, 33 bp, homo sapiens
ggtaacactgctgccartatgttcatggaggta

SEQ ID NO: 7523 - DNA, 33 bp, homo sapiens
aggttacgtccaataartaaatatgacattgat

SEQ ID NO: 7524 - DNA, 33 bp, homo sapiens
catctctcctatggcaytctacctcctgacagc

SEQ ID NO: 7525 - DNA, 33 bp, homo sapiens
tgctgagaagagggagraaacttcagaacacta

SEQ ID NO: 7526 - DNA, 33 bp, homo sapiens
agtctgttgacggactragacaatctcatttag

SEQ ID NO: 7527 - DNA, 33 bp, homo sapiens
gggaaggatggtctgaragaagagattgtagcc

SEQ ID NO: 7528 - DNA, 33 bp, homo sapiens
tgattttaatgttgaasggcaaaacttagcatt

SEQ ID NO: 7529 - DNA, 33 bp, homo sapiens
agaattgtggttctaayatttggaactctaaca

SEQ ID NO: 7530 - DNA, 33 bp, homo sapiens
gaggatgtgaatttagrcaacctggctccatag

SEQ ID NO: 7531 - DNA, 33 bp, homo sapiens
ctttttaaactgagcaytactattttatcaatt

SEQ ID NO: 7532 - DNA, 33 bp, homo sapiens
ctgatgactggctgacraagaagctacacagac

SEQ ID NO: 7533 - DNA, 33 bp, homo sapiens
ttgtgcaacatctggakaagtagctacaacaca

SEQ ID NO: 7534 - DNA, 33 bp, homo sapiens
aaacacttccacagaawcactgtagtaaatgct

SEQ ID NO: 7535 - DNA, 33 bp, homo sapiens
gcaagcaggctaacaawtgccaacttttaaaag

SEQ ID NO: 7536 - DNA, 33 bp, homo sapiens
actaagtttgtggaaamggtgtttataaccaac

SEQ ID NO: 7537 - DNA, 33 bp, homo sapiens
ctgcctaaatctaacckgagtatcaacattttt

SEQ ID NO: 7538 - DNA, 33 bp, homo sapiens
aagacagcctaaagcaytctctcttcctatttc

SEQ ID NO: 7539 - DNA, 33 bp, homo sapiens
ccaccttcgcaccaacrctgtccactgggctat

SEQ ID NO: 7540 - DNA, 33 bp, homo sapiens
aataaatgagtatgcartaaagtagatacccag

SEQ ID NO: 7541 - DNA, 33 bp, homo sapiens
gaccatattttccacawagtcttggaattcagg

SEQ ID NO: 7542 - DNA, 33 bp, homo sapiens
aaatacaggttctgtgsaaagaagtgtctagat

SEQ ID NO: 7543 - DNA, 33 bp, homo sapiens
gagcattggtaaagacmaccttctctggacaag

SEQ ID NO: 7544 - DNA, 33 bp, homo sapiens
agattagaaggaaataycaataaagccaaagtt

SEQ ID NO: 7545 - DNA, 33 bp, homo sapiens
ctgtagtggctgaagcrgaaagagctagagagt

SEQ ID NO: 7546 - DNA, 33 bp, homo sapiens
agattgctaggtcacarcaaggacaggtaccct

SEQ ID NO: 7547 - DNA, 33 bp, homo sapiens
aattctgattgcagatwaaagaatcatagtctt

SEQ ID NO: 7548 - DNA, 33 bp, homo sapiens
ctttaagtgacctacawctgcctagctcctgcc

SEQ ID NO: 7549 - DNA, 33 bp, homo sapiens
agaatctggttataaaytgctctcagctaaaag

SEQ ID NO: 7550 - DNA, 33 bp, homo sapiens
gagtggtagaaggacayagcagaaggtaagacc

SEQ ID NO: 7551 - DNA, 33 bp, homo sapiens
gctgccctcaacaccaktagtagcacttctgaa

SEQ ID NO: 7552 - DNA, 33 bp, homo sapiens
ccatgcctggccaagayataggttttaaaaagc

SEQ ID NO: 7553 - DNA, 33 bp, homo sapiens
ccatgaatggaatttcraagattgaagaagcct

SEQ ID NO: 7554 - DNA, 33 bp, homo sapiens
gtgagggcaactgggargcgactgcagcaccca

SEQ ID NO: 7555 - DNA, 33 bp, homo sapiens
tgggatgcaaagatccwctcatgcaatcaatca

SEQ ID NO: 7556 - DNA, 33 bp, homo sapiens
gttctaaaggaagggawctgggcaaaaactgaa

SEQ ID NO: 7557 - DNA, 33 bp, homo sapiens
gtcatctagtgagcaargtaaacatgaaataga

SEQ ID NO: 7558 - DNA, 33 bp, homo sapiens
cactccgaagtttaccygagtggagcggcggca

SEQ ID NO: 7559 - DNA, 33 bp, homo sapiens
cagacaatacataaacraattgacacagctgtt

SEQ ID NO: 7560 - DNA, 33 bp, homo sapiens
gatgggtagattatcayaggtttttcagggtgg

SEQ ID NO: 7561 - DNA, 33 bp, homo sapiens
gacctcaggcttgtcckctttatctcttccaat

SEQ ID NO: 7562 - DNA, 33 bp, homo sapiens
tgagattcgtgccaacmacagacacttgggtac

SEQ ID NO: 7563 - DNA, 33 bp, homo sapiens
gcaaagtactccaatgmagcctagaggaaggcc

SEQ ID NO: 7564 - DNA, 33 bp, homo sapiens
aaaatcagatttaaccsggtcatgaataaagta

SEQ ID NO: 7565 - DNA, 33 bp, homo sapiens
aagagtgagactcagayataagaagtaacttgc

SEQ ID NO: 7566 - DNA, 33 bp, homo sapiens
tagagtcaatagatgartattttcaaggtaggt

SEQ ID NO: 7567 - DNA, 33 bp, homo sapiens
catgctaggggtaagamgggatgacgtggggct

SEQ ID NO: 7568 - DNA, 33 bp, homo sapiens
agagaagggaaagagakaattggttattagtca

SEQ ID NO: 7569 - DNA, 33 bp, homo sapiens
tgacagatggaactagsaaatgaattgtaaaat

SEQ ID NO: 7570 - DNA, 33 bp, homo sapiens
gtcttcttcaaggttakacccagctttgcctca

SEQ ID NO: 7571 - DNA, 33 bp, homo sapiens
gtgtggcttagaacacyagagatgtatcgtctc

SEQ ID NO: 7572 - DNA, 33 bp, homo sapiens
gctgactctgaactcayctaatttcttgtatca

SEQ ID NO: 7573 - DNA, 33 bp, homo sapiens
gatgaggaaactgaaaytcagaataggtggcac

SEQ ID NO: 7574 - DNA, 33 bp, homo sapiens
ttcacaattcagtttayctccactactagatta

SEQ ID NO: 7575 - DNA, 33 bp, homo sapiens
aggcagtgttttcaaartacacagttgatatgg

SEQ ID NO: 7576 - DNA, 33 bp, homo sapiens
tgtatgaaataaaggtsacaaatcttcatttat

SEQ ID NO: 7577 - DNA, 33 bp, homo sapiens
attttattctagctackatttcacagaacaact

SEQ ID NO: 7578 - DNA, 33 bp, homo sapiens
tgtaactgcagaaaackcttctccacaagatag

SEQ ID NO: 7579 - DNA, 33 bp, homo sapiens
atcttcggccaatttargatgcaaattaacact

SEQ ID NO: 7580 - DNA, 33 bp, homo sapiens
tgatctgttgtattaayctcctggaaattctac

SEQ ID NO: 7581 - DNA, 33 bp, homo sapiens
ttgagtgaaagagttgraatagttcaaacacag

SEQ ID NO: 7582 - DNA, 33 bp, homo sapiens
agaatgatctcatccargaggcaagggatctgg

SEQ ID NO: 7583 - DNA, 33 bp, homo sapiens
gtgagatcacaactcaygttcacgctcagtcca

SEQ ID NO: 7584 - DNA, 33 bp, homo sapiens
tctactttaatgaccaygtagctgttctttttg

SEQ ID NO: 7585 - DNA, 33 bp, homo sapiens
acgtaaccatcactccrctgaagacatagaaca

SEQ ID NO: 7586 - DNA, 33 bp, homo sapiens
cacaaatgtcagaaacscttggcatctgagtgc

SEQ ID NO: 7587 - DNA, 33 bp, homo sapiens
agaggacactttatacrgaacagatgggctgat

SEQ ID NO: 7588 - DNA, 33 bp, homo sapiens
gtcagcttaagcaagarcttttgtatttatact

SEQ ID NO: 7589 - DNA, 33 bp, homo sapiens
cctcaaatcaaaaatasaggtgatgctacttat

SEQ ID NO: 7590 - DNA, 33 bp, homo sapiens
gaattcttattaggagkaacaatcccttgcata

SEQ ID NO: 7591 - DNA, 33 bp, homo sapiens
ctctactagtgcagtayggagggaataggtggg

SEQ ID NO: 7592 - DNA, 33 bp, homo sapiens
ctagtaagaaatgttaygcagctgttaaacgat

SEQ ID NO: 7593 - DNA, 33 bp, homo sapiens
gatgtttcggaaacgcyacctagatttcacagg

SEQ ID NO: 7594 - DNA, 33 bp, homo sapiens
acaagagggaaaggacratagtgtgagtgtgag

SEQ ID NO: 7595 - DNA, 33 bp, homo sapiens
gtgaagctgactatgtyaattatgttcttatag

SEQ ID NO: 7596 - DNA, 33 bp, homo sapiens
atatcaagtttcctcaytgaagaactgagtgtc

SEQ ID NO: 7597 - DNA, 33 bp, homo sapiens
gtctcagctaccataaytaaggcactagacatg

SEQ ID NO: 7598 - DNA, 33 bp, homo sapiens
tgggagtggaaatatasaaaagatgcctcctct

SEQ ID NO: 7599 - DNA, 33 bp, homo sapiens
attggctatacttttgraattctattaacgtgt

SEQ ID NO: 7600 - DNA, 33 bp, homo sapiens
caagataaacctgaagsatattgtaagaccagg

SEQ ID NO: 7601 - DNA, 33 bp, homo sapiens
gtgggctctaaatgcartcataagtgttcttat

SEQ ID NO: 7602 - DNA, 33 bp, homo sapiens
aaaaataaacacttagyaggtctcacataatta

SEQ ID NO: 7603 - DNA, 33 bp, homo sapiens
aaaattctcatgccatyaatagaatcaccttga

SEQ ID NO: 7604 - DNA, 33 bp, homo sapiens
atatttaaaattgtccycaatgagttttgtcca

SEQ ID NO: 7605 - DNA, 33 bp, homo sapiens
gacttcggtctcatgaytacttctcagtccaag

SEQ ID NO: 7606 - DNA, 33 bp, homo sapiens
cctagcttacacttgcraagatacttctctaaa

SEQ ID NO: 7607 - DNA, 33 bp, homo sapiens
acttaaatgaacagaarttatgtgactaaattc

SEQ ID NO: 7608 - DNA, 33 bp, homo sapiens
tttgccagctgcttgcratcaaagaatatattt

SEQ ID NO: 7609 - DNA, 33 bp, homo sapiens
ataaagcgactaaggayggcaaccgcaaaagca

SEQ ID NO: 7610 - DNA, 33 bp, homo sapiens
taaactaaactggtgcrataattagcaataact

SEQ ID NO: 7611 - DNA, 33 bp, homo sapiens
ctattttcatttaagarcatacctcggccgggt

SEQ ID NO: 7612 - DNA, 33 bp, homo sapiens
aacgctagcttgggaaytggtcacaatgatgaa

SEQ ID NO: 7613 - DNA, 33 bp, homo sapiens
aagatatgtacacattraaaatttcatatacag

SEQ ID NO: 7614 - DNA, 33 bp, homo sapiens
gtggtctttctgtacckgctgatatgatcatgt

SEQ ID NO: 7615 - DNA, 33 bp, homo sapiens
acgacatttccaacagratagctatggggcaaa

SEQ ID NO: 7616 - DNA, 33 bp, homo sapiens
gccacaaacctgtagcraagcttgagcttgcca

SEQ ID NO: 7617 - DNA, 33 bp, homo sapiens
tattatgcctttgatcycattactcaatactgg

SEQ ID NO: 7618 - DNA, 33 bp, homo sapiens
tttgtgctaccctagaygagggcccagatattt

SEQ ID NO: 7619 - DNA, 33 bp, homo sapiens
aaaaactctttgattcratatcgacttctatta

SEQ ID NO: 7620 - DNA, 33 bp, homo sapiens
tctatatggtctaagargaagcatgaattatct

SEQ ID NO: 7621 - DNA, 33 bp, homo sapiens
cagagaaaggctttcayagaatcaaatgacgag

SEQ ID NO: 7622 - DNA, 33 bp, homo sapiens
gagccttcatgcaacamtattcctggatcttac

SEQ ID NO: 7623 - DNA, 33 bp, homo sapiens
gttatggccatgttacmatgctctgggacttat

SEQ ID NO: 7624 - DNA, 33 bp, homo sapiens
ggtcctgaacctgagamcttcttcagcagtggg

SEQ ID NO: 7625 - DNA, 33 bp, homo sapiens
ttcagttataagacgastaagttctggggatct

SEQ ID NO: 7626 - DNA, 33 bp, homo sapiens
gaaacaagaaggtagayaggtttttgcttttga

SEQ ID NO: 7627 - DNA, 33 bp, homo sapiens
ccaacaccagcctatamgagagcattgagaagg

SEQ ID NO: 7628 - DNA, 33 bp, homo sapiens
acctttatgcatttcarcgttttttctttccat

SEQ ID NO: 7629 - DNA, 33 bp, homo sapiens
gaaacactttgagaaaygaaaatgcaaaaagtt

SEQ ID NO: 7630 - DNA, 33 bp, homo sapiens
atttattttttcagtakgaatgattggcatctg

SEQ ID NO: 7631 - DNA, 33 bp, homo sapiens
aactccatttctttccraagcatatttcttcac

SEQ ID NO: 7632 - DNA, 33 bp, homo sapiens
gttatcttgagggtcarggatccgagtacaggt

SEQ ID NO: 7633 - DNA, 33 bp, homo sapiens
ggctctggggccacackgcttacatcccagctc

SEQ ID NO: 7634 - DNA, 33 bp, homo sapiens
tttttctggttctctcycataaatatggcctat

SEQ ID NO: 7635 - DNA, 33 bp, homo sapiens
gctgaaaagaaggcaamatttacacactataac

SEQ ID NO: 7636 - DNA, 33 bp, homo sapiens
gcaagtccatgttccamgtccaggaatgattct

SEQ ID NO: 7637 - DNA, 33 bp, homo sapiens
caggctagtgcacccaygttctagtcttactgt

SEQ ID NO: 7638 - DNA, 33 bp, homo sapiens
taaacaggtatcaaccmacactttctgagcata

SEQ ID NO: 7639 - DNA, 33 bp, homo sapiens
ctaattcttgactcaarggtcttaaaatctgcc

SEQ ID NO: 7640 - DNA, 33 bp, homo sapiens
agatcctacaacagaayggtggtggcatggaat

SEQ ID NO: 7641 - DNA, 33 bp, homo sapiens
gaaataatttaaaacaragtcaatggagctgga

SEQ ID NO: 7642 - DNA, 33 bp, homo sapiens
gggcacagcacagaagragtgttccttttaatt

SEQ ID NO: 7643 - DNA, 33 bp, homo sapiens
gggagttccagaagaarttacttgaaagttagc

SEQ ID NO: 7644 - DNA, 33 bp, homo sapiens
aaagattgtgttcaatrataaagctgtcaaggt

SEQ ID NO: 7645 - DNA, 33 bp, homo sapiens
atgtagaatgctgtgakattaaatcaatagtga

SEQ ID NO: 7646 - DNA, 33 bp, homo sapiens
aaaccatgcttactaaraaggtcaaattgaagg

SEQ ID NO: 7647 - DNA, 33 bp, homo sapiens
ggatgacagagtaaaargtcaagaatcacaaag

SEQ ID NO: 7648 - DNA, 33 bp, homo sapiens
tcaattaaatgggttgyattaatagattgaaag

SEQ ID NO: 7649 - DNA, 33 bp, homo sapiens
gacttcaccaaaatatragtctgcatctccagt

SEQ ID NO: 7650 - DNA, 33 bp, homo sapiens
caccaacccacatgtaygatgactggtggatag

SEQ ID NO: 7651 - DNA, 33 bp, homo sapiens
acaccatccatttcackaaaatgcatgcctcac

SEQ ID NO: 7652 - DNA, 33 bp, homo sapiens
cattgtctggtggtaaragcagcattggtggta

SEQ ID NO: 7653 - DNA, 33 bp, homo sapiens
tacaaatcctccaagcrctgtttatgttttgac

SEQ ID NO: 7654 - DNA, 33 bp, homo sapiens
gtaaaatgtataacgayggcagcagaaaggatg

SEQ ID NO: 7655 - DNA, 33 bp, homo sapiens
ttaatgtgatgtctgaygcataggagtctatgg

SEQ ID NO: 7656 - DNA, 33 bp, homo sapiens
tttgatctctgttttcmcctctagacttcttat

SEQ ID NO: 7657 - DNA, 33 bp, homo sapiens
actggctctgcaagtaygaggagcaggcctcaa

SEQ ID NO: 7658 - DNA, 33 bp, homo sapiens
caacctgtttacagacrgctagaattcccaagc

SEQ ID NO: 7659 - DNA, 33 bp, homo sapiens
ctgtaagtgtctcatgragctagattaccacac

SEQ ID NO: 7660 - DNA, 33 bp, homo sapiens
atgtatccacagacagrcaaaaggagaccacca

SEQ ID NO: 7661 - DNA, 33 bp, homo sapiens
tatcttcttaattcccrcatcactctcaactag

SEQ ID NO: 7662 - DNA, 33 bp, homo sapiens
gcaagatggttagaaakcgttaatgagtaccca

SEQ ID NO: 7663 - DNA, 33 bp, homo sapiens
gatgagaaagctattcrcctacagacactggcc

SEQ ID NO: 7664 - DNA, 33 bp, homo sapiens
tgttatgaaatgctaartacttgaaaccaaaac

SEQ ID NO: 7665 - DNA, 33 bp, homo sapiens
atcgaatgattacttaygagatgccaggtacca

SEQ ID NO: 7666 - DNA, 33 bp, homo sapiens
cagagtaagacaatgayaccaagccagatggtt

SEQ ID NO: 7667 - DNA, 33 bp, homo sapiens
taaggatgagaaaaaaytgtgaaagtatgtcct

SEQ ID NO: 7668 - DNA, 33 bp, homo sapiens
tgtgttttcagtgtgakggaaagattgtttcca

SEQ ID NO: 7669 - DNA, 33 bp, homo sapiens
tttttctttctaagccracatattttgattcaa

SEQ ID NO: 7670 - DNA, 33 bp, homo sapiens
tagtccctttaacatarccattgcctcactatc

SEQ ID NO: 7671 - DNA, 33 bp, homo sapiens
actgctaaaatcatgargaaatgcaacctatag

SEQ ID NO: 7672 - DNA, 33 bp, homo sapiens
tagtgaaagacttttawagttcagaacatggtc

SEQ ID NO: 7673 - DNA, 33 bp, homo sapiens
atattttttgcagatargaagaaggatggaaag

SEQ ID NO: 7674 - DNA, 33 bp, homo sapiens
gaatttatcttagcaaygtcacttctctattat

SEQ ID NO: 7675 - DNA, 33 bp, homo sapiens
taaatagttgatgcagmatggagtagtggggat

SEQ ID NO: 7676 - DNA, 33 bp, homo sapiens
ggccctgggcttacaayggtgccatgagcctta

SEQ ID NO: 7677 - DNA, 33 bp, homo sapiens
gattcaatgatcagaayctccatgacagaaatt

SEQ ID NO: 7678 - DNA, 33 bp, homo sapiens
aagccatttctaatacyatgacgctataaagaa

SEQ ID NO: 7679 - DNA, 33 bp, homo sapiens
agcacaggcctagctaytacttgaagaagcccc

SEQ ID NO: 7680 - DNA, 33 bp, homo sapiens
tgctgaagccacccagmaagatgctcctgcaga

SEQ ID NO: 7681 - DNA, 33 bp, homo sapiens
ttttgaatggagaaacraaaagtaggctcataa

SEQ ID NO: 7682 - DNA, 33 bp, homo sapiens
cccttcactgggttcayaatctagctaagaaaa

SEQ ID NO: 7683 - DNA, 33 bp, homo sapiens
tacccaagaagttcagycgagtggatgagacag

SEQ ID NO: 7684 - DNA, 33 bp, homo sapiens
ggacacccaccagggaytcaacaaaagccaagt

SEQ ID NO: 7685 - DNA, 33 bp, homo sapiens
ttttcctttctagaatratccttgctcttaccc

SEQ ID NO: 7686 - DNA, 33 bp, homo sapiens
caaactgtttatttacraattgagcattgcacg

SEQ ID NO: 7687 - DNA, 33 bp, homo sapiens
aaagtgtgtataaataygtgaaaaatgtgaatt

SEQ ID NO: 7688 - DNA, 33 bp, homo sapiens
tgattatattaatatcmaactttcaggaccatc

SEQ ID NO: 7689 - DNA, 33 bp, homo sapiens
tagcccaaatatccaarctgaagttagcttaaa

SEQ ID NO: 7690 - DNA, 33 bp, homo sapiens
cccttggtaaatcctcrcctttcatctaactgg

SEQ ID NO: 7691 - DNA, 33 bp, homo sapiens
tgaataaatataataaycgaagttgtgaaatgt

SEQ ID NO: 7692 - DNA, 33 bp, homo sapiens
agtatggctcccatcayctgagtagtgagtata

SEQ ID NO: 7693 - DNA, 33 bp, homo sapiens
agtgaaccatctaagasatcatgctgggattca

SEQ ID NO: 7694 - DNA, 33 bp, homo sapiens
cccaggcctgcacataraaggtgttagtaccct

SEQ ID NO: 7695 - DNA, 33 bp, homo sapiens
gtgggaccatctgacckcctgttagtatccctc

SEQ ID NO: 7696 - DNA, 33 bp, homo sapiens
gagaacagggaccttcyctgattatgtcccaag

SEQ ID NO: 7697 - DNA, 33 bp, homo sapiens
tccaggtacaggacacyataaatggaatgttaa

SEQ ID NO: 7698 - DNA, 33 bp, homo sapiens
ctattgaaagaacaaawggattccctgagagct

SEQ ID NO: 7699 - DNA, 33 bp, homo sapiens
tacaccaaagtgaagamattctttgacagatct

SEQ ID NO: 7700 - DNA, 33 bp, homo sapiens
caactgtatttcagacraaggaattttcttcag

SEQ ID NO: 7701 - DNA, 33 bp, homo sapiens
aaaaacagcagggtctraagtcattattgtgtg

SEQ ID NO: 7702 - DNA, 33 bp, homo sapiens
aataggataatggaagrctatttaatgcaggta

SEQ ID NO: 7703 - DNA, 33 bp, homo sapiens
ttttttttggagcttaygttccagtgagagaga

SEQ ID NO: 7704 - DNA, 33 bp, homo sapiens
atgttctgaggcattaygacggtccgttcagcc

SEQ ID NO: 7705 - DNA, 33 bp, homo sapiens
cttctgagttcacctgyagttcatagataattc

SEQ ID NO: 7706 - DNA, 33 bp, homo sapiens
ctacagtccagcatacrgaaggcattaagaaac

SEQ ID NO: 7707 - DNA, 33 bp, homo sapiens
aagacaaggagtactamtagacacaaaaagtca

SEQ ID NO: 7708 - DNA, 33 bp, homo sapiens
cactggctttggaacayggcgacagggatgagc

SEQ ID NO: 7709 - DNA, 33 bp, homo sapiens
ccaggctgagaggtgaygacccaagatgggttc

SEQ ID NO: 7710 - DNA, 33 bp, homo sapiens
caatttgaggaaagtcraggccggaccagtagc

SEQ ID NO: 7711 - DNA, 33 bp, homo sapiens
cactgcaaagctaggcyatttctgggtgaggaa

SEQ ID NO: 7712 - DNA, 33 bp, homo sapiens
tcatatttgcaatacayctttagcacagattaa

SEQ ID NO: 7713 - DNA, 33 bp, homo sapiens
actacaaaaacctgtayagctgttacaaagcag

SEQ ID NO: 7714 - DNA, 33 bp, homo sapiens
cagatagaagcccctcygactaaagctgggccc

SEQ ID NO: 7715 - DNA, 33 bp, homo sapiens
tgctgaacaaaacaaargttagacaaagtagaa

SEQ ID NO: 7716 - DNA, 33 bp, homo sapiens
gctattttggttgcacrcacatgatgtcattta

SEQ ID NO: 7717 - DNA, 33 bp, homo sapiens
cctgaagggcatccgartatgtccttcctcctt

SEQ ID NO: 7718 - DNA, 33 bp, homo sapiens
gcccgtccttccatgaygtgttcaagcagctgg

SEQ ID NO: 7719 - DNA, 33 bp, homo sapiens
tgctacaacagagccasagacaaatcaacagtg

SEQ ID NO: 7720 - DNA, 33 bp, homo sapiens
agctaacaaccatgatraaacattacaggaggt

SEQ ID NO: 7721 - DNA, 33 bp, homo sapiens
ctcatacatcaagtcayggtttcttcacaacag

SEQ ID NO: 7722 - DNA, 33 bp, homo sapiens
ttagtatgtgacagacracaacgtggtggacac

SEQ ID NO: 7723 - DNA, 33 bp, homo sapiens
ggtgctggattctaccracctcttaatattact

SEQ ID NO: 7724 - DNA, 33 bp, homo sapiens
tatgtaatttttgaagrcaatgtacaaattaaa

SEQ ID NO: 7725 - DNA, 33 bp, homo sapiens
atttgtcacagtgcaartgttagaatttcatca

SEQ ID NO: 7726 - DNA, 33 bp, homo sapiens
tgtgatcgtaagaaaaygacctaaataccatga

SEQ ID NO: 7727 - DNA, 33 bp, homo sapiens
acaatttgctccaacayctgcaggctactgtac

SEQ ID NO: 7728 - DNA, 33 bp, homo sapiens
ggatgtggtggcatgargaacgtacagctcctg

SEQ ID NO: 7729 - DNA, 33 bp, homo sapiens
attaaatgtcatgagcrgaataagggtaaagac

SEQ ID NO: 7730 - DNA, 33 bp, homo sapiens
tcaatttacaaagtgargtcagtttctcatctc

SEQ ID NO: 7731 - DNA, 33 bp, homo sapiens
aattattgcagtggaaygatcaagacttaagtc

SEQ ID NO: 7732 - DNA, 33 bp, homo sapiens
tttggcatcattgtaaycgtgtattgcagtgga

SEQ ID NO: 7733 - DNA, 33 bp, homo sapiens
taagtaatgccaaccayaaaagaagaggataac

SEQ ID NO: 7734 - DNA, 33 bp, homo sapiens
ctgggaggtgggagaawcctgagactcacgaat

SEQ ID NO: 7735 - DNA, 33 bp, homo sapiens
aggaccttcagatcacrcagagtgaacagctag

SEQ ID NO: 7736 - DNA, 33 bp, homo sapiens
gtcatgcccttaagacratcaaacttcttgatt

SEQ ID NO: 7737 - DNA, 33 bp, homo sapiens
tggctttaggatctggycaaatacatctacctc

SEQ ID NO: 7738 - DNA, 33 bp, homo sapiens
cctaattttattgtcaygaggcagaaatgaaat

SEQ ID NO: 7739 - DNA, 33 bp, homo sapiens
acctaactcccaagtaycttgaagcattaaata

SEQ ID NO: 7740 - DNA, 33 bp, homo sapiens
acctaattttcctaagycctctagattgctcat

SEQ ID NO: 7741 - DNA, 33 bp, homo sapiens
agaatgtagacctataygatgatccacttccac

SEQ ID NO: 7742 - DNA, 33 bp, homo sapiens
tgtgactaaatgcacartatgaggcgttggggt

SEQ ID NO: 7743 - DNA, 33 bp, homo sapiens
tagctcttaattcatcracctgaaactattctt

SEQ ID NO: 7744 - DNA, 33 bp, homo sapiens
ggcatgaaagctcctayagcattgataaatttc

SEQ ID NO: 7745 - DNA, 33 bp, homo sapiens
ctggataatgaaacaarcaggaccttgatctct

SEQ ID NO: 7746 - DNA, 33 bp, homo sapiens
caccttgaggatagcaragaaacaaaaacaaag

SEQ ID NO: 7747 - DNA, 33 bp, homo sapiens
tcttcgccttgtctccrcatatggtcttccctc

SEQ ID NO: 7748 - DNA, 33 bp, homo sapiens
atgtgaatgaggcaackctgctgtttggatgga

SEQ ID NO: 7749 - DNA, 33 bp, homo sapiens
gctgctctttctagtayagcttttatcataata

SEQ ID NO: 7750 - DNA, 33 bp, homo sapiens
gacacctgtttgagtaygtagcctatgttaagc

SEQ ID NO: 7751 - DNA, 33 bp, homo sapiens
gaagctactttgttccycatacaccatatctgt

SEQ ID NO: 7752 - DNA, 33 bp, homo sapiens
ctgattttggggtcacractgtgtgagtttgga

SEQ ID NO: 7753 - DNA, 33 bp, homo sapiens
ggttggacctcacaatraacagcagaacagaaa

SEQ ID NO: 7754 - DNA, 33 bp, homo sapiens
aaaaacctggattaacygtgaagaaaatagcaa

SEQ ID NO: 7755 - DNA, 33 bp, homo sapiens
cagcggcaaagcactgraattccaactggctct

SEQ ID NO: 7756 - DNA, 33 bp, homo sapiens
acacagtcccaagtagkcattggttctgagact

SEQ ID NO: 7757 - DNA, 33 bp, homo sapiens
tcacctgtaaaaaatgsactaatggtctcttta

SEQ ID NO: 7758 - DNA, 33 bp, homo sapiens
atattaactacctgcarctagatgtggctactt

SEQ ID NO: 7759 - DNA, 33 bp, homo sapiens
gagagccaacagggtgwatattctagtctgcat

SEQ ID NO: 7760 - DNA, 33 bp, homo sapiens
agactcaaaaattggcygaataaatatattcca

SEQ ID NO: 7761 - DNA, 33 bp, homo sapiens
ctgctgggtaatttgcrgatgctgtaatgaagg

SEQ ID NO: 7762 - DNA, 33 bp, homo sapiens
caccagggcctgtgcawcctataaccacaaccc

SEQ ID NO: 7763 - DNA, 33 bp, homo sapiens
aggatgtatagatatgyagcagtagtcagcaca

SEQ ID NO: 7764 - DNA, 33 bp, homo sapiens
gaaaaggtgtgtggaaraagttgaatccagacc

SEQ ID NO: 7765 - DNA, 33 bp, homo sapiens
attttgcctgtattctsaatctcacaggtcttg

SEQ ID NO: 7766 - DNA, 33 bp, homo sapiens
gagcccacggtgagccraagtcaaagcctcacc

SEQ ID NO: 7767 - DNA, 33 bp, homo sapiens
attcgaattgtgtctamatctgtccacttcacc

SEQ ID NO: 7768 - DNA, 33 bp, homo sapiens
ccattccccaacctccrctgcgcaggccaagca

SEQ ID NO: 7769 - DNA, 33 bp, homo sapiens
ctttgagaagagctgamcttcactgtggtttat

SEQ ID NO: 7770 - DNA, 33 bp, homo sapiens
cttactaatttaaaaarcagttcacaatagctc

SEQ ID NO: 7771 - DNA, 33 bp, homo sapiens
atccacgtgcacagackggggaaaaacttgagt

SEQ ID NO: 7772 - DNA, 33 bp, homo sapiens
tgtcacactggtgatcragtttctgacatgtga

SEQ ID NO: 7773 - DNA, 33 bp, homo sapiens
gggatgcagacgaagasaaagtggctaccgcca

SEQ ID NO: 7774 - DNA, 33 bp, homo sapiens
tctgcctcctggtcccygcagatcgcccagacc

SEQ ID NO: 7775 - DNA, 33 bp, homo sapiens
tcatggtcaccccagargacaggccttcctttc

SEQ ID NO: 7776 - DNA, 33 bp, homo sapiens
agggcagatgggctgamagtagggaaggaggct

SEQ ID NO: 7777 - DNA, 33 bp, homo sapiens
cccttgtaatgttcacrggttggggacacaggc

SEQ ID NO: 7778 - DNA, 33 bp, homo sapiens
ttctcacatgtggcackctacacggactggggt

SEQ ID NO: 7779 - DNA, 33 bp, homo sapiens
gagcttcaagtgttcayagcaggacctcaagag

SEQ ID NO: 7780 - DNA, 33 bp, homo sapiens
ggttgtctgttctaagyatgtgttctgaaatgg

SEQ ID NO: 7781 - DNA, 33 bp, homo sapiens
ctaaccaggctttgtcrctgcagagctggcctc

SEQ ID NO: 7782 - DNA, 33 bp, homo sapiens
gtggataaaacatggcyctccacttccctgttt

SEQ ID NO: 7783 - DNA, 33 bp, homo sapiens
ctcacctgccaggcacyctccaaccaagtctat

SEQ ID NO: 7784 - DNA, 33 bp, homo sapiens
gcacacattccaatagmatttacagcaataaca

SEQ ID NO: 7785 - DNA, 33 bp, homo sapiens
tagtcctttgtgcaaarcgtaaatgcagaaact

SEQ ID NO: 7786 - DNA, 33 bp, homo sapiens
attcctggtatccttayatgaagagggagaatg

SEQ ID NO: 7787 - DNA, 33 bp, homo sapiens
ttaaagtgcaagaaaaygggcaagaattacaaa

SEQ ID NO: 7788 - DNA, 33 bp, homo sapiens
acaacaagatgtgtgaygcctacgaaagtcttt

SEQ ID NO: 7789 - DNA, 33 bp, homo sapiens
tcaacaatgaagaaaaycacaatggaaccatac

SEQ ID NO: 7790 - DNA, 33 bp, homo sapiens
gtgcctgacaatgcaasgactggattcacagac

SEQ ID NO: 7791 - DNA, 33 bp, homo sapiens
gcaaaataaccatgtascagtccacaaagaaag

SEQ ID NO: 7792 - DNA, 33 bp, homo sapiens
actaaaaggtagcttcrcccagatctggcagtc

SEQ ID NO: 7793 - DNA, 33 bp, homo sapiens
gagtaaagagaagctayaaggggaaggaaaata

SEQ ID NO: 7794 - DNA, 33 bp, homo sapiens
ctgtgacaacaagacascatattcttattttgt

SEQ ID NO: 7795 - DNA, 33 bp, homo sapiens
agtagcagaaaacgcaktctttcacattccagt

SEQ ID NO: 7796 - DNA, 33 bp, homo sapiens
gagtgtctgtctgcgamaatgattttgcatcgt

SEQ ID NO: 7797 - DNA, 33 bp, homo sapiens
tcatcatcttaccctcraggcctgcttctttgc

SEQ ID NO: 7798 - DNA, 33 bp, homo sapiens
tgcaaatgtaggccacrcaattaatgggaaata

SEQ ID NO: 7799 - DNA, 33 bp, homo sapiens
ttctttgtggtaggaaragtataatgaaataat

SEQ ID NO: 7800 - DNA, 33 bp, homo sapiens
ccattcctggctgacgyaagaataggaatttag

SEQ ID NO: 7801 - DNA, 33 bp, homo sapiens
tctcttatgccaccatraactagagctgtgggt

SEQ ID NO: 7802 - DNA, 33 bp, homo sapiens
tgaccttatcacctatmaactgtgtgacctatt

SEQ ID NO: 7803 - DNA, 33 bp, homo sapiens
ccctaatcctgtggcaraggtcactcaaaccct

SEQ ID NO: 7804 - DNA, 33 bp, homo sapiens
attccaaatgataaagrcaattggcaaatgcaa

SEQ ID NO: 7805 - DNA, 33 bp, homo sapiens
ttcagtgtccatataasacaggcacatagacca

SEQ ID NO: 7806 - DNA, 33 bp, homo sapiens
tcagtattataagtgaygtggcctaaaatatca

SEQ ID NO: 7807 - DNA, 33 bp, homo sapiens
tatttcttcattttcaktaacgccagcccagga

SEQ ID NO: 7808 - DNA, 33 bp, homo sapiens
acatagaaactccatgycaggaacccaggacaa

SEQ ID NO: 7809 - DNA, 33 bp, homo sapiens
ctggattgaatgccatsaactgtgtgagttaat

SEQ ID NO: 7810 - DNA, 33 bp, homo sapiens
agatctagaaatttcargatgatggtgtacgtg

SEQ ID NO: 7811 - DNA, 33 bp, homo sapiens
aaaaataaacctgtaaytgtactggctcttgct

SEQ ID NO: 7812 - DNA, 33 bp, homo sapiens
tggttgctgtgagcctwacccttattctttgtt

SEQ ID NO: 7813 - DNA, 33 bp, homo sapiens
gtttaatgatctcagargtataagataagctat

SEQ ID NO: 7814 - DNA, 33 bp, homo sapiens
gactagacaaattcaawgagtcagaaagtaaaa

SEQ ID NO: 7815 - DNA, 33 bp, homo sapiens
gcttgtattttccttaygctatggttagatatt

SEQ ID NO: 7816 - DNA, 33 bp, homo sapiens
gtgtgattctggatacrttttgaaaatagaacc

SEQ ID NO: 7817 - DNA, 33 bp, homo sapiens
tatctgcaaattttaamaacttggcaatataat

SEQ ID NO: 7818 - DNA, 33 bp, homo sapiens
acacatcctctacagamgctaaaaccaaagata

SEQ ID NO: 7819 - DNA, 33 bp, homo sapiens
taaagacagtagctaamgttgggtagggtttct

SEQ ID NO: 7820 - DNA, 33 bp, homo sapiens
gtgtactacaaagacartgaagagtaaggtgat

SEQ ID NO: 7821 - DNA, 33 bp, homo sapiens
gcaaaacctatcctaaycaaacttagctaacta

SEQ ID NO: 7822 - DNA, 33 bp, homo sapiens
ggctgaagtcaaacctmagactgtctgacacta

SEQ ID NO: 7823 - DNA, 33 bp, homo sapiens
gggtatcacctggcaasgggtctgaacgaacta

SEQ ID NO: 7824 - DNA, 33 bp, homo sapiens
aaaagagagaagtctakgggcattaaaatacat

SEQ ID NO: 7825 - DNA, 33 bp, homo sapiens
gaattgttgcaaaagtsaattacagaaagtgaa

SEQ ID NO: 7826 - DNA, 33 bp, homo sapiens
tggaacagcatccaagraatactacttgatggc

SEQ ID NO: 7827 - DNA, 33 bp, homo sapiens
tcacattctcacatcamatcttccagggaagag

SEQ ID NO: 7828 - DNA, 33 bp, homo sapiens
gatttgggatgccagckgaaagtgacctgaaaa

SEQ ID NO: 7829 - DNA, 33 bp, homo sapiens
tctgaagcccattcccrcgataatgttctgagt

SEQ ID NO: 7830 - DNA, 33 bp, homo sapiens
attttacccatctctcratgtctgatctcactc

SEQ ID NO: 7831 - DNA, 33 bp, homo sapiens
actttgaaaagtcttarcagtgaaattgtaatt

SEQ ID NO: 7832 - DNA, 33 bp, homo sapiens
taacagaacatcctaaytcagccagcaattaca

SEQ ID NO: 7833 - DNA, 33 bp, homo sapiens
cttcaccgaatgatgaygtcttctgagggagga

SEQ ID NO: 7834 - DNA, 33 bp, homo sapiens
gaagtaggctgggtgasatcctgggagcagagc

SEQ ID NO: 7835 - DNA, 33 bp, homo sapiens
gtattcattaagtatamccaaatctctgaatct

SEQ ID NO: 7836 - DNA, 33 bp, homo sapiens
tctaaactatcattcgyccctcccagctactcc

SEQ ID NO: 7837 - DNA, 33 bp, homo sapiens
agaaggtgaggtctcarcaagataccaggcaac

SEQ ID NO: 7838 - DNA, 33 bp, homo sapiens
tatattttgaacatgckctacagaaacagctcc

SEQ ID NO: 7839 - DNA, 33 bp, homo sapiens
tctacaaagaacgtaarcaaatatacaagaaaa

SEQ ID NO: 7840 - DNA, 33 bp, homo sapiens
ctacactgcaaggccasgattgaaatccacaat

SEQ ID NO: 7841 - DNA, 33 bp, homo sapiens
ggtgttgagactcatartaactcagtaacacct

SEQ ID NO: 7842 - DNA, 33 bp, homo sapiens
acataaatagtggatartaaccagcatcttcct

SEQ ID NO: 7843 - DNA, 33 bp, homo sapiens
gggacaaaggcctacasattagaagtggcagga

SEQ ID NO: 7844 - DNA, 33 bp, homo sapiens
gcaggggttgctatackaatatcagacaaaata

SEQ ID NO: 7845 - DNA, 33 bp, homo sapiens
caataggaatgacaaaytgcagaaggcagagga

SEQ ID NO: 7846 - DNA, 33 bp, homo sapiens
actctgtcgcagcaaawcaaaatgtaagtttca

SEQ ID NO: 7847 - DNA, 33 bp, homo sapiens
gagtctagacgggaaamtctgtaagcaaaatat

SEQ ID NO: 7848 - DNA, 33 bp, homo sapiens
tgaaaaaacttgctgtkaaaccatgcacgcacg

SEQ ID NO: 7849 - DNA, 33 bp, homo sapiens
ccatgaggaagcccaaraagcctgtaaaccctg

SEQ ID NO: 7850 - DNA, 33 bp, homo sapiens
actgacttgttggatgycacaaggatagtaact

SEQ ID NO: 7851 - DNA, 33 bp, homo sapiens
tggaagttcagagttasagatattaaacaatcc

SEQ ID NO: 7852 - DNA, 33 bp, homo sapiens
acccaatgtagaagatsaattagatttttgaac

SEQ ID NO: 7853 - DNA, 33 bp, homo sapiens
gatgcttggatgtccaygaactacacagaagac

SEQ ID NO: 7854 - DNA, 33 bp, homo sapiens
tcaaaaatgtatactayatggcaagacaagtga

SEQ ID NO: 7855 - DNA, 33 bp, homo sapiens
ttacctaacagataatracattaagcattttgt

SEQ ID NO: 7856 - DNA, 33 bp, homo sapiens
tctaatatttggacctmaactaaggcaaactga

SEQ ID NO: 7857 - DNA, 33 bp, homo sapiens
gcttaagaaaattaagkcactgggccaagacca

SEQ ID NO: 7858 - DNA, 33 bp, homo sapiens
taactctgtaaatttaygctgctttcttttccc

SEQ ID NO: 7859 - DNA, 33 bp, homo sapiens
tattgtcgaggaaatamgctggtttgttatttt

SEQ ID NO: 7860 - DNA, 33 bp, homo sapiens
tatacacacatattcargaaatttggtgcaaca

SEQ ID NO: 7861 - DNA, 33 bp, homo sapiens
taaaatatataagccaytgaggtaagtagttgt

SEQ ID NO: 7862 - DNA, 33 bp, homo sapiens
tgaacatctacaatcartgactttgagtaaaag

SEQ ID NO: 7863 - DNA, 33 bp, homo sapiens
ttaagtacactcataakgttatgccaccattac

SEQ ID NO: 7864 - DNA, 33 bp, homo sapiens
ggttaacagcaactacygggtttgtgtcagata

SEQ ID NO: 7865 - DNA, 33 bp, homo sapiens
cccagatttgtgatgasctgcataagccaatag

SEQ ID NO: 7866 - DNA, 33 bp, homo sapiens
agctttacgtgcatctyacggaaacaggataca

SEQ ID NO: 7867 - DNA, 33 bp, homo sapiens
gcactctcttaacatayaggtagagcattttgt

SEQ ID NO: 7868 - DNA, 33 bp, homo sapiens
gcatggagaaaagcctsagagaacatctaccaa

SEQ ID NO: 7869 - DNA, 33 bp, homo sapiens
tgataccaaagtggacmgtcaaggaacagatgc

SEQ ID NO: 7870 - DNA, 33 bp, homo sapiens
taagacatgagaaggayagctttaattttaggg

SEQ ID NO: 7871 - DNA, 33 bp, homo sapiens
catcattcagtaattckcaatcctggttgcatg

SEQ ID NO: 7872 - DNA, 33 bp, homo sapiens
ttactgtatcctaaaasgtccttgtctctcttt

SEQ ID NO: 7873 - DNA, 33 bp, homo sapiens
gcctttaaatgaatgckgaagatttgaaaaggt

SEQ ID NO: 7874 - DNA, 33 bp, homo sapiens
tctggatgctttgtaargaatagattgggaggt

SEQ ID NO: 7875 - DNA, 33 bp, homo sapiens
gagacctagtcccccartgctttcattctttaa

SEQ ID NO: 7876 - DNA, 33 bp, homo sapiens
gagggtagactccataytaactgacaggctgtc

SEQ ID NO: 7877 - DNA, 33 bp, homo sapiens
ccctaaaagaagctaaygcatggtctttggaac

SEQ ID NO: 7878 - DNA, 33 bp, homo sapiens
attggcgtctgtgatastacacactttggcttt

SEQ ID NO: 7879 - DNA, 33 bp, homo sapiens
tctcaaaaacctgagasattgtacaagcaacag

SEQ ID NO: 7880 - DNA, 33 bp, homo sapiens
gatacttcacaaaatasattttacacagataca

SEQ ID NO: 7881 - DNA, 33 bp, homo sapiens
tgacagtattgttacayctatgtcaggggtggg

SEQ ID NO: 7882 - DNA, 33 bp, homo sapiens
gaaatggtagggatcaygtcacctcattttcac

SEQ ID NO: 7883 - DNA, 33 bp, homo sapiens
aatgggcgctcaagtayctgggctcataactgt

SEQ ID NO: 7884 - DNA, 33 bp, homo sapiens
atttttaaagcaatggkcatttaaaacaacatt

SEQ ID NO: 7885 - DNA, 33 bp, homo sapiens
tagatatatcattccawtctctgtcttcatctt

SEQ ID NO: 7886 - DNA, 33 bp, homo sapiens
gatggtcacttaaatasatagacacaccctgtt

SEQ ID NO: 7887 - DNA, 33 bp, homo sapiens
tttgccacattaaatarcaaacatacagtgttt

SEQ ID NO: 7888 - DNA, 33 bp, homo sapiens
tgaaaaaggatcatgamgtcaagccatctagac

SEQ ID NO: 7889 - DNA, 33 bp, homo sapiens
aacagatctatttgtgkatgttttaaaggagga

SEQ ID NO: 7890 - DNA, 33 bp, homo sapiens
aaggaaatctgtgaaaytgttacagccatgggg

SEQ ID NO: 7891 - DNA, 33 bp, homo sapiens
tttctatgtaacaatarcgcaattttattattt

SEQ ID NO: 7892 - DNA, 33 bp, homo sapiens
gtttatggaaatcacayggaaaatatggagagg

SEQ ID NO: 7893 - DNA, 33 bp, homo sapiens
agcaatgaaattctagraaaatcaaaatgcccc

SEQ ID NO: 7894 - DNA, 33 bp, homo sapiens
ctcatgtttgtagttayaagaatcctgcctcat

SEQ ID NO: 7895 - DNA, 33 bp, homo sapiens
cttcacactctgctccrattgacttatttccca

SEQ ID NO: 7896 - DNA, 33 bp, homo sapiens
gcactgtataatgtcawcttctgcctttctcaa

SEQ ID NO: 7897 - DNA, 33 bp, homo sapiens
tataattgcttctaggwagagttggcatttata

SEQ ID NO: 7898 - DNA, 33 bp, homo sapiens
gaagcagtttcaactaycattcatatctcactc

SEQ ID NO: 7899 - DNA, 33 bp, homo sapiens
aagccagtggtcagacrgactttcccacaatac

SEQ ID NO: 7900 - DNA, 33 bp, homo sapiens
ccatcaaaatagccagkagcaatccccagggcc

SEQ ID NO: 7901 - DNA, 33 bp, homo sapiens
agtactgaatatacaaygtccaaatatcaattc

SEQ ID NO: 7902 - DNA, 33 bp, homo sapiens
taacaaccatgtctaaytctccaaaaactgtgg

SEQ ID NO: 7903 - DNA, 33 bp, homo sapiens
ctgccctttgttacagratcatcatgccaataa

SEQ ID NO: 7904 - DNA, 33 bp, homo sapiens
gagctcacactgccaasaaatacaaagtgttac

SEQ ID NO: 7905 - DNA, 33 bp, homo sapiens
aagacatgggcctcccmaatacccaaaacaata

SEQ ID NO: 7906 - DNA, 33 bp, homo sapiens
ttaggaggaagatttayggtattttttggcact

SEQ ID NO: 7907 - DNA, 33 bp, homo sapiens
gcttgtggtaatcagasctaggacttttctact

SEQ ID NO: 7908 - DNA, 33 bp, homo sapiens
tgctgttgttggcccaygaggaaactgtgacta

SEQ ID NO: 7909 - DNA, 33 bp, homo sapiens
gaggctgagagctgggsattttttttcactggt

SEQ ID NO: 7910 - DNA, 33 bp, homo sapiens
gagctcagaagtaaagyatcagataatggtcaa

SEQ ID NO: 7911 - DNA, 33 bp, homo sapiens
tcacctggtcaatgccsatcccctgcagtgaga

SEQ ID NO: 7912 - DNA, 33 bp, homo sapiens
gcaggtcgttaatgcamatggatgccctgcctg

SEQ ID NO: 7913 - DNA, 33 bp, homo sapiens
gttgaatgaaataaacyacctagagcattgatt

SEQ ID NO: 7914 - DNA, 33 bp, homo sapiens
tcacattgccacgacgwaagtccagcacaccct

SEQ ID NO: 7915 - DNA, 33 bp, homo sapiens
ttttgtcgatattctasaaagagaatcaaatag

SEQ ID NO: 7916 - DNA, 33 bp, homo sapiens
cccacgagacagtcaayagacactggcagggac

SEQ ID NO: 7917 - DNA, 33 bp, homo sapiens
ctaatttgcaaatccartgatatggtcaaatga

SEQ ID NO: 7918 - DNA, 33 bp, homo sapiens
ttaaaggcctcagaagycccagaatggttctgg

SEQ ID NO: 7919 - DNA, 33 bp, homo sapiens
cacccctccaattgtcraacacattctcctaga

SEQ ID NO: 7920 - DNA, 33 bp, homo sapiens
catagagcacttgggasgatgagatccctttca

SEQ ID NO: 7921 - DNA, 33 bp, homo sapiens
tctgccttccaagcaayataactgacaagcaac

SEQ ID NO: 7922 - DNA, 33 bp, homo sapiens
gagctcagtttgcctayactgggtagcattttg

SEQ ID NO: 7923 - DNA, 33 bp, homo sapiens
ggtagagaattgaagayagagcataattttagt

SEQ ID NO: 7924 - DNA, 33 bp, homo sapiens
aatatttggttggtaaratagagtagaccatca

SEQ ID NO: 7925 - DNA, 33 bp, homo sapiens
tatggcgtaatttcccrggattattgggtattg

SEQ ID NO: 7926 - DNA, 33 bp, homo sapiens
atcaagtctccaaatcyagggcaacaaactatg

SEQ ID NO: 7927 - DNA, 33 bp, homo sapiens
gtacagtgagataggcwcagaaacagagaaagg

SEQ ID NO: 7928 - DNA, 33 bp, homo sapiens
aatcacctgcaagtccraaattgatcatatttg

SEQ ID NO: 7929 - DNA, 33 bp, homo sapiens
gccttcattcaaaatgractaggctgccttaga

SEQ ID NO: 7930 - DNA, 33 bp, homo sapiens
aactggagtacttttgyaatactgctttgagga

SEQ ID NO: 7931 - DNA, 33 bp, homo sapiens
aagacaatttaattgamgcaaggaaagaagttg

SEQ ID NO: 7932 - DNA, 33 bp, homo sapiens
cctaaaaaagtacccakctaaagcattttacat

SEQ ID NO: 7933 - DNA, 33 bp, homo sapiens
actgtagttccaataaytgtgctttgtagctat

SEQ ID NO: 7934 - DNA, 33 bp, homo sapiens
gttacatctggcaaccyagaaacaaagttctgt

SEQ ID NO: 7935 - DNA, 33 bp, homo sapiens
ctcccctctttgttccmaataaagtcagtctcc

SEQ ID NO: 7936 - DNA, 33 bp, homo sapiens
ctgcccttggagaaggraggagccatttagagt

SEQ ID NO: 7937 - DNA, 33 bp, homo sapiens
gtaataatttggtaaakaggccctactgctctc

SEQ ID NO: 7938 - DNA, 33 bp, homo sapiens
tatgtgaagttgcaaargagatacataataagt

SEQ ID NO: 7939 - DNA, 33 bp, homo sapiens
cagaagtccaaagaaasagagagagcaggaaaa

SEQ ID NO: 7940 - DNA, 33 bp, homo sapiens
ttggggcctccagctcrcagaatcaattattca

SEQ ID NO: 7941 - DNA, 33 bp, homo sapiens
tgttgattgcctttccrcaaggctaaagacttt

SEQ ID NO: 7942 - DNA, 33 bp, homo sapiens
tgtgatgtttcccttcyagcctcatcagtgaaa

SEQ ID NO: 7943 - DNA, 33 bp, homo sapiens
acagccagttctggaayagtctcacctactggg

SEQ ID NO: 7944 - DNA, 33 bp, homo sapiens
cttgaggtgaaatcaayaccagggtgtccgata

SEQ ID NO: 7945 - DNA, 33 bp, homo sapiens
cctaggactctcctcamaagtatggtatgaccc

SEQ ID NO: 7946 - DNA, 33 bp, homo sapiens
tggcagtgtgcccttayggccaaggaagcagac

SEQ ID NO: 7947 - DNA, 33 bp, homo sapiens
tcttaggagcaagaacsccgctgtgaactgcac

SEQ ID NO: 7948 - DNA, 33 bp, homo sapiens
cactgttacagaatgartaagaatctagggggc

SEQ ID NO: 7949 - DNA, 33 bp, homo sapiens
cactcctatgtgggaargagagaaagatccgca

SEQ ID NO: 7950 - DNA, 33 bp, homo sapiens
ctgtgctgcagacttcyagtgcacttcccacat

SEQ ID NO: 7951 - DNA, 33 bp, homo sapiens
tcaaaattgtgcctaamaagctaaaaccacatt

SEQ ID NO: 7952 - DNA, 33 bp, homo sapiens
ttttcctaacctcaaaktcatactgcaatgata

SEQ ID NO: 7953 - DNA, 33 bp, homo sapiens
ttaatcattagggaaaygcaagtgaaaactgca

SEQ ID NO: 7954 - DNA, 33 bp, homo sapiens
acctgttttgacaaagragtactatcagatgtt

SEQ ID NO: 7955 - DNA, 33 bp, homo sapiens
tgcagtaacatgaatgracatttatccaaagga

SEQ ID NO: 7956 - DNA, 33 bp, homo sapiens
ctcatatcaagaacaaygtgactttgatgctat

SEQ ID NO: 7957 - DNA, 33 bp, homo sapiens
attatcaaataggtagwcctggaaatttcaatt

SEQ ID NO: 7958 - DNA, 33 bp, homo sapiens
atgagacagattgctargagcttagtaaaggaa

SEQ ID NO: 7959 - DNA, 33 bp, homo sapiens
gaaaaatatagttcccraaatattctgcttgat

SEQ ID NO: 7960 - DNA, 33 bp, homo sapiens
caagataaatggatgarggaagttcacttcttt

SEQ ID NO: 7961 - DNA, 33 bp, homo sapiens
aaggagagagtgaaaaygtcaaaatcttttaat

SEQ ID NO: 7962 - DNA, 33 bp, homo sapiens
gtttgttttctgatgayagaggtagttcaaaga

SEQ ID NO: 7963 - DNA, 33 bp, homo sapiens
catggaccattcttaawatcttaggacccttaa

SEQ ID NO: 7964 - DNA, 33 bp, homo sapiens
actgatacagaacacartgacctttcatttatt

SEQ ID NO: 7965 - DNA, 33 bp, homo sapiens
cagaaaatagcaaaaakaacacgtcctacttac

SEQ ID NO: 7966 - DNA, 33 bp, homo sapiens
tttggatcaagagcaamgggaaagttatgatct

SEQ ID NO: 7967 - DNA, 33 bp, homo sapiens
tagcaggagcaaatcakgaaatccaattgaaaa

SEQ ID NO: 7968 - DNA, 33 bp, homo sapiens
ctcatagattatttagycagtcctggttatatt

SEQ ID NO: 7969 - DNA, 33 bp, homo sapiens
ttcagcctaaggacacmatacactaggtttgca

SEQ ID NO: 7970 - DNA, 33 bp, homo sapiens
ttcatagacttctccastagctctactttgtgg

SEQ ID NO: 7971 - DNA, 33 bp, homo sapiens
aaactccattacagagraacaataacttttgaa

SEQ ID NO: 7972 - DNA, 33 bp, homo sapiens
gccagtgaccagtataygtaattgaaaaacgca

SEQ ID NO: 7973 - DNA, 33 bp, homo sapiens
tgattgctttgattggratacattttaaataaa

SEQ ID NO: 7974 - DNA, 33 bp, homo sapiens
tgtgaagctgggtagarattaaacatggtgatt

SEQ ID NO: 7975 - DNA, 33 bp, homo sapiens
gattatcagacgcagaraaggtcttcaataaga

SEQ ID NO: 7976 - DNA, 33 bp, homo sapiens
aactcccaggtaggacmaacgaggggagaagaa

SEQ ID NO: 7977 - DNA, 33 bp, homo sapiens
agaaggtaagagtacaytgacatatgcttaaga

SEQ ID NO: 7978 - DNA, 33 bp, homo sapiens
caatagagtgaagacasaacctggcgggtagaa

SEQ ID NO: 7979 - DNA, 33 bp, homo sapiens
tcagattcctcagagaygaaaaattctgtattg

SEQ ID NO: 7980 - DNA, 33 bp, homo sapiens
atctctaaaaggtaaaytgtcatctttcttatt

SEQ ID NO: 7981 - DNA, 33 bp, homo sapiens
tcagaaaacaccaagcyctagttgctgggtcat

SEQ ID NO: 7982 - DNA, 33 bp, homo sapiens
ctcttcaccttctgtawgttcaagttctcctgt

SEQ ID NO: 7983 - DNA, 33 bp, homo sapiens
taaatacttgtgtcacrggcagtagtacacgta

SEQ ID NO: 7984 - DNA, 33 bp, homo sapiens
gctaagcaaagtcctgraagttggtgagatcac

SEQ ID NO: 7985 - DNA, 33 bp, homo sapiens
ttttagaggattgttawgcttcacttgtgatgc

SEQ ID NO: 7986 - DNA, 33 bp, homo sapiens
ataagcactttacacaratttaattgtcaacct

SEQ ID NO: 7987 - DNA, 33 bp, homo sapiens
atttttccttctttcartattggcagcaacatt

SEQ ID NO: 7988 - DNA, 33 bp, homo sapiens
atttccaatagtcctgmagtgatgttagctaag

SEQ ID NO: 7989 - DNA, 33 bp, homo sapiens
gttggttgaatggacargtatttacacaggatt

SEQ ID NO: 7990 - DNA, 33 bp, homo sapiens
aaggatgaaaagtaatsaagaatgcatatggaa

SEQ ID NO: 7991 - DNA, 33 bp, homo sapiens
atacatagttgaaggayggcaacctacaaactt

SEQ ID NO: 7992 - DNA, 33 bp, homo sapiens
ttcagcttaaaaagcawatcatttgataacaat

SEQ ID NO: 7993 - DNA, 33 bp, homo sapiens
aaacaggtagttttccrgagttattaaagtttg

SEQ ID NO: 7994 - DNA, 33 bp, homo sapiens
cagtggctgccacacartaagtgtctattgatg

SEQ ID NO: 7995 - DNA, 33 bp, homo sapiens
acctctcacctcagcarattcttcagtaataat

SEQ ID NO: 7996 - DNA, 33 bp, homo sapiens
gatgcctcagttttctmacgtcaggacctttgt

SEQ ID NO: 7997 - DNA, 33 bp, homo sapiens
catagttattcaggaaycaatcaatcaaaatta

SEQ ID NO: 7998 - DNA, 33 bp, homo sapiens
ggtccccaaatccatawgttgaaggtctagtgc

SEQ ID NO: 7999 - DNA, 33 bp, homo sapiens
aaaataatgtggaaaargtgagtggtatgccca

SEQ ID NO: 8000 - DNA, 33 bp, homo sapiens
caagaaaattataaaasagcttaggacggaaac

SEQ ID NO: 8001 - DNA, 33 bp, homo sapiens
gatcactgtgtagtagsaacattttaaccatat

SEQ ID NO: 8002 - DNA, 33 bp, homo sapiens
taaatcaatgtagttcrcttgcacacctattgg

SEQ ID NO: 8003 - DNA, 33 bp, homo sapiens
ttttatcatccaggtaytacatctactatccat

SEQ ID NO: 8004 - DNA, 33 bp, homo sapiens
ttttctctgaacagtaratctcaacagtgagct

SEQ ID NO: 8005 - DNA, 33 bp, homo sapiens
gactttcagcaccttcrcttacccagtggtaga

SEQ ID NO: 8006 - DNA, 33 bp, homo sapiens
accagagagtgaataargcagagaagaatttta

SEQ ID NO: 8007 - DNA, 33 bp, homo sapiens
atgggaactatggtaastgcctctaggtggttg

SEQ ID NO: 8008 - DNA, 33 bp, homo sapiens
ccttaacaaagtaacayggactggatgacttaa

SEQ ID NO: 8009 - DNA, 33 bp, homo sapiens
atctatttttattgaaygtctctagtcggtctt

SEQ ID NO: 8010 - DNA, 33 bp, homo sapiens
tttggccctcaaaaacrgttaatgcctccttca

SEQ ID NO: 8011 - DNA, 33 bp, homo sapiens
ccacttctcagttcaaycacaaaccctaagatg

SEQ ID NO: 8012 - DNA, 33 bp, homo sapiens
cgtacagaggatcagayatgacagatatgagaa

SEQ ID NO: 8013 - DNA, 33 bp, homo sapiens
caacagtgcttcaatcmagaacggctgggcata

SEQ ID NO: 8014 - DNA, 33 bp, homo sapiens
gatgaagctgaaacaaracccttattaagctac

SEQ ID NO: 8015 - DNA, 33 bp, homo sapiens
cattaacagaagtctayacacaaatacaaacac

SEQ ID NO: 8016 - DNA, 33 bp, homo sapiens
tccgaagcaaaccataractctctgtggaagag

SEQ ID NO: 8017 - DNA, 33 bp, homo sapiens
aattcacttcgtgttcrcgtaacatagagaaca

SEQ ID NO: 8018 - DNA, 33 bp, homo sapiens
ttgcagaaaagagttcraatgctcacatgtgtc

SEQ ID NO: 8019 - DNA, 33 bp, homo sapiens
atgactaaatctataargagagaacaaatttga

SEQ ID NO: 8020 - DNA, 33 bp, homo sapiens
gtttcacttccagagcsctgcttaggcccgacc

SEQ ID NO: 8021 - DNA, 33 bp, homo sapiens
tatagtgaaaattacaycgtatacacaatcaca

SEQ ID NO: 8022 - DNA, 33 bp, homo sapiens
attggacattacctaarggacttctaagagaga

SEQ ID NO: 8023 - DNA, 33 bp, homo sapiens
cctggtaatgttcacaygtcctcaaatcaaccc

SEQ ID NO: 8024 - DNA, 33 bp, homo sapiens
tcagtaatgaaagaggkactatccctacaccaa

SEQ ID NO: 8025 - DNA, 33 bp, homo sapiens
gctctttaagcaactartagagatttcatttga

SEQ ID NO: 8026 - DNA, 33 bp, homo sapiens
ggttcagtgaggcctayactatcatggtcagtg

SEQ ID NO: 8027 - DNA, 33 bp, homo sapiens
gtgaaaagcattccagraagggggcagcacata

SEQ ID NO: 8028 - DNA, 33 bp, homo sapiens
ccctgacctttaccacygtatcagggccacagg

SEQ ID NO: 8029 - DNA, 33 bp, homo sapiens
ggccaaggtggttgtaygtatctggtctgtgtg

SEQ ID NO: 8030 - DNA, 33 bp, homo sapiens
cagggacttaaggcagwagtggaaaaactagac

SEQ ID NO: 8031 - DNA, 33 bp, homo sapiens
tcaagctcaggaacatraggagcaacacctcct

SEQ ID NO: 8032 - DNA, 33 bp, homo sapiens
ccaccaatctaattaasagagtcatgggaccta

SEQ ID NO: 8033 - DNA, 33 bp, homo sapiens
catgattcagaaatcartccgtgaaagacatac

SEQ ID NO: 8034 - DNA, 33 bp, homo sapiens
cacaaaatcaaatagamctcctcaacctgcaag

SEQ ID NO: 8035 - DNA, 33 bp, homo sapiens
tattctcattcactcartccttaactttgttct

SEQ ID NO: 8036 - DNA, 33 bp, homo sapiens
gctgctgagacctatcrgaggaaagaaggtgcc

SEQ ID NO: 8037 - DNA, 33 bp, homo sapiens
caggctctaagggagaktcctttcctcgtggct

SEQ ID NO: 8038 - DNA, 33 bp, homo sapiens
tccacacccgtcagcastaatcttccacgcagc

SEQ ID NO: 8039 - DNA, 33 bp, homo sapiens
tggagacagttagtgcrattattaacaggacac

SEQ ID NO: 8040 - DNA, 33 bp, homo sapiens
ttgtttcagcagaatcrgagagagatttaaaag

SEQ ID NO: 8041 - DNA, 33 bp, homo sapiens
ggcaagtcacacgacckcatcaaacttgaaggt

SEQ ID NO: 8042 - DNA, 33 bp, homo sapiens
ctggcaggtaatacaaygatctgagcatggggc

SEQ ID NO: 8043 - DNA, 33 bp, homo sapiens
gaagagtagaatccagrccatagtggtggccca

SEQ ID NO: 8044 - DNA, 33 bp, homo sapiens
ttggtcaccttcaagcrcagccggctggtcaca

SEQ ID NO: 8045 - DNA, 33 bp, homo sapiens
ttaacttctagaaaaayttgccacacattgtag

SEQ ID NO: 8046 - DNA, 33 bp, homo sapiens
aatacaaagggataaaycattgatgtagacaag

SEQ ID NO: 8047 - DNA, 33 bp, homo sapiens
gatttcatattccaacrgaaaaataacatttac

SEQ ID NO: 8048 - DNA, 33 bp, homo sapiens
ggtcacaagcattggakaatttgtcctccctgc

SEQ ID NO: 8049 - DNA, 33 bp, homo sapiens
ctaattctgcgtccgartaagagctatcacata

SEQ ID NO: 8050 - DNA, 33 bp, homo sapiens
acaggcgaggcgcttaytaaatagtccacaggc

SEQ ID NO: 8051 - DNA, 33 bp, homo sapiens
agacactgcccctctgmaggtaggagcgtccaa

SEQ ID NO: 8052 - DNA, 33 bp, homo sapiens
tctggtggggtgagaarggggtgacaatgatgt

SEQ ID NO: 8053 - DNA, 33 bp, homo sapiens
caacacatatattagcygagaatatgggtacaa

SEQ ID NO: 8054 - DNA, 33 bp, homo sapiens
ccatatggatgtgccaygatttgtttctctatt

SEQ ID NO: 8055 - DNA, 33 bp, homo sapiens
ctctagagtcacccttyaaatctggttttcgct

SEQ ID NO: 8056 - DNA, 33 bp, homo sapiens
tcttcatcttttggtaygatttttttaggctca

SEQ ID NO: 8057 - DNA, 33 bp, homo sapiens
agtgtgatctatagaaygaggaaagcaaaacta

SEQ ID NO: 8058 - DNA, 33 bp, homo sapiens
tgatgctaactcctgcraagtgtagctacaaac

SEQ ID NO: 8059 - DNA, 33 bp, homo sapiens
atttcccaacttctcaygacaaacccttctgat

SEQ ID NO: 8060 - DNA, 33 bp, homo sapiens
cttaggagataagagasgccgaatcttggtact

SEQ ID NO: 8061 - DNA, 33 bp, homo sapiens
ggaataggagcttacayaggtaattgagtgatt

SEQ ID NO: 8062 - DNA, 33 bp, homo sapiens
caattcctgcagcaaasaaaagatatataacat

SEQ ID NO: 8063 - DNA, 33 bp, homo sapiens
atctggtaagaaacaamgattcaaaaatgacta

SEQ ID NO: 8064 - DNA, 33 bp, homo sapiens
tgtataaaattatacartggactccaaaaagtt

SEQ ID NO: 8065 - DNA, 33 bp, homo sapiens
tggctggtgaatttggrcagtttagataattct

SEQ ID NO: 8066 - DNA, 33 bp, homo sapiens
gcaggacgctaacttakccagagacttctgtga

SEQ ID NO: 8067 - DNA, 33 bp, homo sapiens
tcatgtgaaccactaamatttactgcttatttt

SEQ ID NO: 8068 - DNA, 33 bp, homo sapiens
attctcatgattttacyctcttgtattcattca

SEQ ID NO: 8069 - DNA, 33 bp, homo sapiens
caaatttagaaaaatgratttggtgatcgcatg

SEQ ID NO: 8070 - DNA, 33 bp, homo sapiens
gaacccttttgtgaacyatacatgtgagggatc

SEQ ID NO: 8071 - DNA, 33 bp, homo sapiens
ttataacacttcacagraaagactgatgacaca

SEQ ID NO: 8072 - DNA, 33 bp, homo sapiens
aaatggctttaatcagyacacatttttattgtg

SEQ ID NO: 8073 - DNA, 33 bp, homo sapiens
cattttcttctcttaaycagtccaacttagcca

SEQ ID NO: 8074 - DNA, 33 bp, homo sapiens
agtaaaagtgccaaaamgcaacaacaaccatca

SEQ ID NO: 8075 - DNA, 33 bp, homo sapiens
tgtgagagcaacatagsaaccaaaaaaatataa

SEQ ID NO: 8076 - DNA, 33 bp, homo sapiens
tttggcaaaatctgatyagcttgaattcaaaac

SEQ ID NO: 8077 - DNA, 33 bp, homo sapiens
ggaaaattttttgcccmatggtcacagattaaa

SEQ ID NO: 8078 - DNA, 33 bp, homo sapiens
ctcgatattccacaacracaagcacaaggggtg

SEQ ID NO: 8079 - DNA, 33 bp, homo sapiens
atgatcagataatttgyatttgggctttgaaag

SEQ ID NO: 8080 - DNA, 33 bp, homo sapiens
gtgtttgaggatgatcratgtgaagcccagaaa

SEQ ID NO: 8081 - DNA, 33 bp, homo sapiens
aaaggcatcaaaactcyatttcctgaaatgcat

SEQ ID NO: 8082 - DNA, 33 bp, homo sapiens
tgaatagagtgttcacrgaagaggaaatacaac

SEQ ID NO: 8083 - DNA, 33 bp, homo sapiens
cactaaacactgcaggsacataaggtgaattta

SEQ ID NO: 8084 - DNA, 33 bp, homo sapiens
atctgagctacatacaratccacacaggacaga

SEQ ID NO: 8085 - DNA, 33 bp, homo sapiens
tttacagaaatttaaarcttggcaacccctggg

SEQ ID NO: 8086 - DNA, 33 bp, homo sapiens
gaagaagaggaaagtcratggagaaagcagcct

SEQ ID NO: 8087 - DNA, 33 bp, homo sapiens
gttaaattccacaaaaktataaagaagagctaa

SEQ ID NO: 8088 - DNA, 33 bp, homo sapiens
gaaatcgttgaaggctraaggagagaaatagtt

SEQ ID NO: 8089 - DNA, 33 bp, homo sapiens
acggattcctctcgtaraattcatagattttaa

SEQ ID NO: 8090 - DNA, 33 bp, homo sapiens
agaaataagaacatgarctgttactctggactc

SEQ ID NO: 8091 - DNA, 33 bp, homo sapiens
taaaaatgaagattcargtttttccaaggtgga

SEQ ID NO: 8092 - DNA, 33 bp, homo sapiens
atgattgaaccacaacrctgctagcatttctac

SEQ ID NO: 8093 - DNA, 33 bp, homo sapiens
ctcatgtaaaatgcaakaaggctttgatagtat

SEQ ID NO: 8094 - DNA, 33 bp, homo sapiens
attttgagcatacagawgttttctttctccttt

SEQ ID NO: 8095 - DNA, 33 bp, homo sapiens
agaagagtcaagtaagwccctctccaatgaccc

SEQ ID NO: 8096 - DNA, 33 bp, homo sapiens
cttctatgaatgttacmacagctttacaaagcc

SEQ ID NO: 8097 - DNA, 33 bp, homo sapiens
ataattgataagctgarcatgattaaaatgaaa

SEQ ID NO: 8098 - DNA, 33 bp, homo sapiens
agagatgagcagcagargtcaaaagcagctcag

SEQ ID NO: 8099 - DNA, 33 bp, homo sapiens
acattgcgctaattagyagggagataaagagaa

SEQ ID NO: 8100 - DNA, 33 bp, homo sapiens
agtgattaagaattgcrccgatcactcatcaca

SEQ ID NO: 8101 - DNA, 33 bp, homo sapiens
gattcaaggtgaaactyacttctcaggaatccc

SEQ ID NO: 8102 - DNA, 33 bp, homo sapiens
tatgccttggtgtctcyaaatctgcttcttttc

SEQ ID NO: 8103 - DNA, 33 bp, homo sapiens
cacatttgtgggtcccrgaaattcagacttcag

SEQ ID NO: 8104 - DNA, 33 bp, homo sapiens
ggatacttaacctatamgtggctgccaagagtg

SEQ ID NO: 8105 - DNA, 33 bp, homo sapiens
gccctagatgctaccayggggccggagcccaga

SEQ ID NO: 8106 - DNA, 33 bp, homo sapiens
atcattctgttatttcyctctgtagtgggcact

SEQ ID NO: 8107 - DNA, 33 bp, homo sapiens
gaatgtgtcccccagaygtttccaacctatgca

SEQ ID NO: 8108 - DNA, 33 bp, homo sapiens
cagagcagactctggayggtgcatgagcctact

SEQ ID NO: 8109 - DNA, 33 bp, homo sapiens
gaaaataaatgcaagcmatcttattaattatgt

SEQ ID NO: 8110 - DNA, 33 bp, homo sapiens
tggaacttgtcacggayatcactcctgcttctc

SEQ ID NO: 8111 - DNA, 33 bp, homo sapiens
taggtcactttaatacyctgcttgaaagttact

SEQ ID NO: 8112 - DNA, 33 bp, homo sapiens
aaatgcttacttttgayagtggcgattatgtgt

SEQ ID NO: 8113 - DNA, 33 bp, homo sapiens
gtttgaaaaatgtctcmatctctatgttagtag

SEQ ID NO: 8114 - DNA, 33 bp, homo sapiens
gatgcactgagtgctasaaatgaggactggcag

SEQ ID NO: 8115 - DNA, 33 bp, homo sapiens
agattttggttgttggyatctgaatgagtctta

SEQ ID NO: 8116 - DNA, 33 bp, homo sapiens
aacaacacacttgtatragcagcgaggaaagag

SEQ ID NO: 8117 - DNA, 33 bp, homo sapiens
gcatattgtatttcacyggctactttgtgaatt

SEQ ID NO: 8118 - DNA, 33 bp, homo sapiens
actgacctaaataaaayaagtgccatgtaaata

SEQ ID NO: 8119 - DNA, 33 bp, homo sapiens
gatcattttttaagcartaggctcagacctttt

SEQ ID NO: 8120 - DNA, 33 bp, homo sapiens
tctgttcacatttgctraagaactttggaacaa

SEQ ID NO: 8121 - DNA, 33 bp, homo sapiens
atgaacactaaaatgcrcggttagacctcaaat

SEQ ID NO: 8122 - DNA, 33 bp, homo sapiens
acagctgttaaacaaastaggtctaagaaaaaa

SEQ ID NO: 8123 - DNA, 33 bp, homo sapiens
ctgaagacctagagatkaatgctacgttattga

SEQ ID NO: 8124 - DNA, 33 bp, homo sapiens
catagtactctagttayaggcacattgtgagaa

SEQ ID NO: 8125 - DNA, 33 bp, homo sapiens
aggtagcagaaaagatraaccatttgcacatat

SEQ ID NO: 8126 - DNA, 33 bp, homo sapiens
tctgactgccctgtccycttggttaccctgact

SEQ ID NO: 8127 - DNA, 33 bp, homo sapiens
tttagacctaagctgakattctgtgccattaat

SEQ ID NO: 8128 - DNA, 33 bp, homo sapiens
tcagttaaaaaaacaascatctttatgggcagg

SEQ ID NO: 8129 - DNA, 33 bp, homo sapiens
tgctaaaacaccaaaawtgtctctgcttgtaag

SEQ ID NO: 8130 - DNA, 33 bp, homo sapiens
agaaatgtccagcagargggaattagatatgaa

SEQ ID NO: 8131 - DNA, 33 bp, homo sapiens
ggtaagctcaagaaagkcagccatctaactctg

SEQ ID NO: 8132 - DNA, 33 bp, homo sapiens
ttaagtttgaaagagaygataaaaagcagtctt

SEQ ID NO: 8133 - DNA, 33 bp, homo sapiens
agtctaatgtgtctaakccaggccttaatagaa

SEQ ID NO: 8134 - DNA, 33 bp, homo sapiens
ctggtagacagagctaygatgactccacaggga

SEQ ID NO: 8135 - DNA, 33 bp, homo sapiens
acttggatagtaacacsagcagataaggagctc

SEQ ID NO: 8136 - DNA, 33 bp, homo sapiens
atcaacatgcccataakaacctctgcaaaatct

SEQ ID NO: 8137 - DNA, 33 bp, homo sapiens
ctcctacagatcactcracctctgaggttccat

SEQ ID NO: 8138 - DNA, 33 bp, homo sapiens
aatgaccctgttcaacrctggccttgagctgaa

SEQ ID NO: 8139 - DNA, 33 bp, homo sapiens
aaagagtttattcagaycaagtgttcattatgt

SEQ ID NO: 8140 - DNA, 33 bp, homo sapiens
gggcgaattttctctaycagcatttacattgct

SEQ ID NO: 8141 - DNA, 33 bp, homo sapiens
gctaaagatgtacgaayatatgtccaagggata

SEQ ID NO: 8142 - DNA, 33 bp, homo sapiens
ttaatggctggaaatcygagtagaaatattcat

SEQ ID NO: 8143 - DNA, 33 bp, homo sapiens
tagtcctaaaatatccracacaatttttttgaa

SEQ ID NO: 8144 - DNA, 33 bp, homo sapiens
gaaaaagcccatggaawtgaacaattgaggtta

SEQ ID NO: 8145 - DNA, 33 bp, homo sapiens
cctgctgcttcgatgcyaggaaggttcttctag

SEQ ID NO: 8146 - DNA, 33 bp, homo sapiens
ctcttcaatcagtgatragcagtaagagacgag

SEQ ID NO: 8147 - DNA, 33 bp, homo sapiens
agagaccataattccakagcgttgtagccccac

SEQ ID NO: 8148 - DNA, 33 bp, homo sapiens
ggagccctcttaccccrcaggtaggagcaatca

SEQ ID NO: 8149 - DNA, 33 bp, homo sapiens
attacaaatccccccaracttcattccttcttt

SEQ ID NO: 8150 - DNA, 33 bp, homo sapiens
tcatttgaaatgtatcmaaatgtcctcacaaac

SEQ ID NO: 8151 - DNA, 33 bp, homo sapiens
ctattggctaagctggraattagatagaaataa

SEQ ID NO: 8152 - DNA, 33 bp, homo sapiens
caagttacctgctatcwatggtatatctaacat

SEQ ID NO: 8153 - DNA, 33 bp, homo sapiens
actatcaaatgaacccrgagaagtacatttgtt

SEQ ID NO: 8154 - DNA, 33 bp, homo sapiens
agttgggatcgcacaayaggtagccattttaga

SEQ ID NO: 8155 - DNA, 33 bp, homo sapiens
ttttctgcagctaccaygggggcttaagttctt

SEQ ID NO: 8156 - DNA, 33 bp, homo sapiens
caggtctaaatcccaastcctgcccaaccctac

SEQ ID NO: 8157 - DNA, 33 bp, homo sapiens
tgcaaattaactggaarctatagagaaaagcag

SEQ ID NO: 8158 - DNA, 33 bp, homo sapiens
acaatttgaaagatacrgaagccaatgctttac

SEQ ID NO: 8159 - DNA, 33 bp, homo sapiens
ttgcacttacacttgaygagtagtacgtatatt

SEQ ID NO: 8160 - DNA, 33 bp, homo sapiens
ttatggacaaccaatayataacagaaaacaaag

SEQ ID NO: 8161 - DNA, 33 bp, homo sapiens
ttatgttatttgttaaytggaatgttcttagaa

SEQ ID NO: 8162 - DNA, 33 bp, homo sapiens
gtgtgctactcatatgragagacagaagcattt

SEQ ID NO: 8163 - DNA, 33 bp, homo sapiens
tcagaaggtagaaggaygaccaaaaccgcacag

SEQ ID NO: 8164 - DNA, 33 bp, homo sapiens
tccttagggtcttttayggctgcctaccccttg

SEQ ID NO: 8165 - DNA, 33 bp, homo sapiens
tgatgtcttacaaagcrctcagctctggctctg

SEQ ID NO: 8166 - DNA, 33 bp, homo sapiens
actttgaagatccaacrgtaggtgtaaccttca

SEQ ID NO: 8167 - DNA, 33 bp, homo sapiens
aaggtgaagccttgtargtttgttgctcctacg

SEQ ID NO: 8168 - DNA, 33 bp, homo sapiens
tatatgcaaggagtctyaccatccttattggtc

SEQ ID NO: 8169 - DNA, 33 bp, homo sapiens
atatgaatctttttctsactttctgattatttc

SEQ ID NO: 8170 - DNA, 33 bp, homo sapiens
gcatatttgttcttaaygataagctttaaagtg

SEQ ID NO: 8171 - DNA, 33 bp, homo sapiens
attactgcccggggcakatgaagaactgttttt

SEQ ID NO: 8172 - DNA, 33 bp, homo sapiens
ggtctcctgctgaaacyctgtggagtagcctca

SEQ ID NO: 8173 - DNA, 33 bp, homo sapiens
tctacttcttgcagagkaaagcaccttaaacat

SEQ ID NO: 8174 - DNA, 33 bp, homo sapiens
aaactatgtgatagcargttgttgttttaaacc

SEQ ID NO: 8175 - DNA, 33 bp, homo sapiens
cccatgaacctgtgcckcactcttttcagtgtt

SEQ ID NO: 8176 - DNA, 33 bp, homo sapiens
gctgaggttgcatggayattgcagtgagtccat

SEQ ID NO: 8177 - DNA, 33 bp, homo sapiens
tatttttcctcaccccrgctttattgaggtata

SEQ ID NO: 8178 - DNA, 33 bp, homo sapiens
tagatgagtgaaccacsactgcatgacccaaag

SEQ ID NO: 8179 - DNA, 33 bp, homo sapiens
ggcaatgaccacacaasagtgcccatgaggtga

SEQ ID NO: 8180 - DNA, 33 bp, homo sapiens
aaaaaatacagtgagasagatggaaatgcaaag

SEQ ID NO: 8181 - DNA, 33 bp, homo sapiens
gcatcctgttgctggcrgaagcactgacacctt

SEQ ID NO: 8182 - DNA, 33 bp, homo sapiens
gagtgaaaggagctagwcaaaagagtatgcaga

SEQ ID NO: 8183 - DNA, 33 bp, homo sapiens
catgggcctgtgttcakgtgcatacgtggggcc

SEQ ID NO: 8184 - DNA, 33 bp, homo sapiens
tgtgcaaagtcaaaacrccattactgtggatca

SEQ ID NO: 8185 - DNA, 33 bp, homo sapiens
attcaaattttgcctaygtgggagggagaatcc

SEQ ID NO: 8186 - DNA, 33 bp, homo sapiens
aactatgccaaggtacrcgtggaaggatgctgt

SEQ ID NO: 8187 - DNA, 33 bp, homo sapiens
gtgaactccacactgargaccgggagactgggt

SEQ ID NO: 8188 - DNA, 33 bp, homo sapiens
tgttacatttgaactayatttgaagcagcatag

SEQ ID NO: 8189 - DNA, 33 bp, homo sapiens
gctgctgatggccaagyaggcaacacctgctag

SEQ ID NO: 8190 - DNA, 33 bp, homo sapiens
accacagagacatccayggtagtaaagataaag

SEQ ID NO: 8191 - DNA, 33 bp, homo sapiens
acattttctatcacacratggtttgctagttac

SEQ ID NO: 8192 - DNA, 33 bp, homo sapiens
ttatccttgacatcccrcactcaaccatgaaca

SEQ ID NO: 8193 - DNA, 33 bp, homo sapiens
ctttgaaaagattttcsgacatgataattagct

SEQ ID NO: 8194 - DNA, 33 bp, homo sapiens
ttgcaatatatccagaratcttgcaaaataaga

SEQ ID NO: 8195 - DNA, 33 bp, homo sapiens
atacaagatcggagaaygattttctggtcttaa

SEQ ID NO: 8196 - DNA, 33 bp, homo sapiens
ttatgaggggaatgtcraaagcacataaggaaa

SEQ ID NO: 8197 - DNA, 33 bp, homo sapiens
ctaatctgaaatcttamaaggacaccaacaatc

SEQ ID NO: 8198 - DNA, 33 bp, homo sapiens
atgcaagctcccttaaytgagtatgcccaaaaa

SEQ ID NO: 8199 - DNA, 33 bp, homo sapiens
tgaaggaacgtattatsagtcctggagaaaaca

SEQ ID NO: 8200 - DNA, 33 bp, homo sapiens
gctggctccccaggaartagacccaggatggag

SEQ ID NO: 8201 - DNA, 33 bp, homo sapiens
ctttcaagcaaaatgartaagtttcaagtagca

SEQ ID NO: 8202 - DNA, 33 bp, homo sapiens
cagaagatgatggggawaaaaaggaatttcaac

SEQ ID NO: 8203 - DNA, 33 bp, homo sapiens
ggagcgtcctgcaatgyacctgattagggctct

SEQ ID NO: 8204 - DNA, 33 bp, homo sapiens
acaattacaaaggagcraggtttctacatttgt

SEQ ID NO: 8205 - DNA, 33 bp, homo sapiens
ctttgactcatttattwaaaaaggcttcatgta

SEQ ID NO: 8206 - DNA, 33 bp, homo sapiens
ttctaaaggtaacttcrgaaactatcaaatatt

SEQ ID NO: 8207 - DNA, 33 bp, homo sapiens
gaactccatataggacrcttgactaagatccca

SEQ ID NO: 8208 - DNA, 33 bp, homo sapiens
ccccgggttggtgccckgacaggagaatgttct

SEQ ID NO: 8209 - DNA, 33 bp, homo sapiens
ctaactgtccctaaaartccatcccagtaaaag

SEQ ID NO: 8210 - DNA, 33 bp, homo sapiens
acagacagatgacagasaggcaacagccacagc

SEQ ID NO: 8211 - DNA, 33 bp, homo sapiens
atcaccctggacactgraagtctggttggatgc

SEQ ID NO: 8212 - DNA, 33 bp, homo sapiens
tgtgtggcatttaccaygtaaccttgctggagc

SEQ ID NO: 8213 - DNA, 33 bp, homo sapiens
gactcaggcaggttacrctacagatttctcacc

SEQ ID NO: 8214 - DNA, 33 bp, homo sapiens
agacatggctaaattayatagcacctccacatt

SEQ ID NO: 8215 - DNA, 33 bp, homo sapiens
ttgccttcagggccacraacagagacttcatag

SEQ ID NO: 8216 - DNA, 33 bp, homo sapiens
caaacctctgataaccrctgatgtttttactgt

SEQ ID NO: 8217 - DNA, 33 bp, homo sapiens
aaattcccactctaccrctcaccagctgtgcaa

SEQ ID NO: 8218 - DNA, 33 bp, homo sapiens
ttaccctgacctgtgakacacttgttggctggc

SEQ ID NO: 8219 - DNA, 33 bp, homo sapiens
tcatagactaccctgcraccattaatacaagga

SEQ ID NO: 8220 - DNA, 33 bp, homo sapiens
attcacaactccatgarggtagatattgtcacc

SEQ ID NO: 8221 - DNA, 33 bp, homo sapiens
tactgaattaggtgaartatcttcttaaaatta

SEQ ID NO: 8222 - DNA, 33 bp, homo sapiens
aagactcaaagatcaarggagagactcaaagat

SEQ ID NO: 8223 - DNA, 33 bp, homo sapiens
gaactcagatgttttgyagagtgaggcagcagg

SEQ ID NO: 8224 - DNA, 33 bp, homo sapiens
gaaaagcacatgaggcratagtaactaatctaa

SEQ ID NO: 8225 - DNA, 33 bp, homo sapiens
ctcagagaagagtggarcagcttttttggtcag

SEQ ID NO: 8226 - DNA, 33 bp, homo sapiens
cctttcttttcattgcwaccttctaagcctatg

SEQ ID NO: 8227 - DNA, 33 bp, homo sapiens
tgtccattgcaacccaygtgatgtcccttaggt

SEQ ID NO: 8228 - DNA, 33 bp, homo sapiens
ctataataaatggctargtatactcgctgacat

SEQ ID NO: 8229 - DNA, 33 bp, homo sapiens
ctgacagacctaagaasaggagaccccagaact

SEQ ID NO: 8230 - DNA, 33 bp, homo sapiens
ggagggcttgggaatcyctgagactagctaaag

SEQ ID NO: 8231 - DNA, 33 bp, homo sapiens
tgatcttgatatggaartctggactgaccagtg

SEQ ID NO: 8232 - DNA, 33 bp, homo sapiens
tttttcttgcaattacrcttttctaatttgttt

SEQ ID NO: 8233 - DNA, 33 bp, homo sapiens
tctgtcagttcttctcyccttcaacctcctgct

SEQ ID NO: 8234 - DNA, 33 bp, homo sapiens
tgtcaaccttcttgccrgccacgtctcccatag

SEQ ID NO: 8235 - DNA, 33 bp, homo sapiens
acaacagtggtccctcragatcatgatatcata

SEQ ID NO: 8236 - DNA, 33 bp, homo sapiens
tcacaaaggaaacaaamcgaacaggacttgaaa

SEQ ID NO: 8237 - DNA, 33 bp, homo sapiens
cagtggaagccaagaargggggtttgcaaatgc

SEQ ID NO: 8238 - DNA, 33 bp, homo sapiens
caactccttcaggcccrgacagtccttgcccat

SEQ ID NO: 8239 - DNA, 33 bp, homo sapiens
tactgtctgttcgcatkactatttttcatactt

SEQ ID NO: 8240 - DNA, 33 bp, homo sapiens
ggctcttcactacctckctacgatttcaccttt

SEQ ID NO: 8241 - DNA, 33 bp, homo sapiens
aacattaccagcacccraaagtcatgttgctgg

SEQ ID NO: 8242 - DNA, 33 bp, homo sapiens
aaataatagatacaaamgaatgccagtcctcat

SEQ ID NO: 8243 - DNA, 33 bp, homo sapiens
ggggcacaaatttggaygctacagtttggatat

SEQ ID NO: 8244 - DNA, 33 bp, homo sapiens
tttcataatttaaagayagaattgccgctatca

SEQ ID NO: 8245 - DNA, 33 bp, homo sapiens
tgtacacatttgtccargctcattgaattttac

SEQ ID NO: 8246 - DNA, 33 bp, homo sapiens
ccctacaccatgcccaktcctttcactgtcatg

SEQ ID NO: 8247 - DNA, 33 bp, homo sapiens
cagttttcaaaacagcragctatatggttgttt

SEQ ID NO: 8248 - DNA, 33 bp, homo sapiens
tattcatgagtttgccraatttaaccaggggaa

SEQ ID NO: 8249 - DNA, 33 bp, homo sapiens
gttgtttggggggaaakatgaataaaactaaga

SEQ ID NO: 8250 - DNA, 33 bp, homo sapiens
acatctctcttgtataycactccactaaacttc

SEQ ID NO: 8251 - DNA, 33 bp, homo sapiens
aagagagaggttacaaraacaagaaagatgtta

SEQ ID NO: 8252 - DNA, 33 bp, homo sapiens
atggttagaaaatctasacaagggatgatacct

SEQ ID NO: 8253 - DNA, 33 bp, homo sapiens
cagtttaaagcagggakaattcagtacacatcc

SEQ ID NO: 8254 - DNA, 33 bp, homo sapiens
tacaggtttcttaatayaccatcggttcctttt

SEQ ID NO: 8255 - DNA, 33 bp, homo sapiens
ggaggcaggagatggasaatgcaagactggtgg

SEQ ID NO: 8256 - DNA, 33 bp, homo sapiens
aacacaggcgatagccmagtagtgcttatagct

SEQ ID NO: 8257 - DNA, 33 bp, homo sapiens
agcatgaaaggtcaccratcacatattagcata

SEQ ID NO: 8258 - DNA, 33 bp, homo sapiens
acattcactttcaaagratttccaacttaaagc

SEQ ID NO: 8259 - DNA, 33 bp, homo sapiens
gaataatccctagtgasaaagcagatcagtaga

SEQ ID NO: 8260 - DNA, 33 bp, homo sapiens
gtaggtcctactggtaytaatttataggactct

SEQ ID NO: 8261 - DNA, 33 bp, homo sapiens
ggggactaaaaggtgawctgtggtagctaatct

SEQ ID NO: 8262 - DNA, 33 bp, homo sapiens
ttagtttcttttattcwcagtataggcctattt

SEQ ID NO: 8263 - DNA, 33 bp, homo sapiens
ctctcacatttcataawgtttgtttggtgaaca

SEQ ID NO: 8264 - DNA, 33 bp, homo sapiens
gttaatttagctttaawcattatttggtaagtt

SEQ ID NO: 8265 - DNA, 33 bp, homo sapiens
ctcacagctataccaaycaaatcagttcttaca

SEQ ID NO: 8266 - DNA, 33 bp, homo sapiens
ccttgaatgccaagcaraaagagatcattaatg

SEQ ID NO: 8267 - DNA, 33 bp, homo sapiens
aaaatctagcaaaatgycaggcaaatgacgaga

SEQ ID NO: 8268 - DNA, 33 bp, homo sapiens
agaactgaaaggatatraaaccagattatctca

SEQ ID NO: 8269 - DNA, 33 bp, homo sapiens
tggaatgtgtattggcygagcacgttgatttgc

SEQ ID NO: 8270 - DNA, 33 bp, homo sapiens
tcccgataaatcgtgtmaattatttgctcagcc

SEQ ID NO: 8271 - DNA, 33 bp, homo sapiens
gcagttgcacaaataarcataacctaggatctg

SEQ ID NO: 8272 - DNA, 33 bp, homo sapiens
cctcaccagcctttaaygcctgtaaaatgtgga

SEQ ID NO: 8273 - DNA, 33 bp, homo sapiens
gcaattctagtgagcaycctaaagtgaaatgtc

SEQ ID NO: 8274 - DNA, 33 bp, homo sapiens
gctcttcccagtgacarggcttgaaatccttct

SEQ ID NO: 8275 - DNA, 33 bp, homo sapiens
tctcaactgggcatgayactataatacattacc

SEQ ID NO: 8276 - DNA, 33 bp, homo sapiens
tcaatgagatgcaagaragggatccttgagcat

SEQ ID NO: 8277 - DNA, 33 bp, homo sapiens
gtattatttattgccarggactttgataggaag

SEQ ID NO: 8278 - DNA, 33 bp, homo sapiens
tattctccacacctctraatttccttgagcatt

SEQ ID NO: 8279 - DNA, 33 bp, homo sapiens
acagctacttcagaacyggtgtccccacagaga

SEQ ID NO: 8280 - DNA, 33 bp, homo sapiens
ttccatttgtaatcagyaatgtgatctgcattt

SEQ ID NO: 8281 - DNA, 33 bp, homo sapiens
gctgagtgaattcttasctctcactctagctgg

SEQ ID NO: 8282 - DNA, 33 bp, homo sapiens
aacacttctcatttcaracaagtagaataaagt

SEQ ID NO: 8283 - DNA, 33 bp, homo sapiens
tcagaagattgatcatwaccaattcttttgtgt

SEQ ID NO: 8284 - DNA, 33 bp, homo sapiens
atacagatgaataatayccagcccctctagagg

SEQ ID NO: 8285 - DNA, 33 bp, homo sapiens
catttggtaacagaagmaggctgttgacgttca

SEQ ID NO: 8286 - DNA, 33 bp, homo sapiens
cgcatagggatactcartaggtattatttctcc

SEQ ID NO: 8287 - DNA, 33 bp, homo sapiens
gtcttaactgaaaatayagtcaatgttaatacc

SEQ ID NO: 8288 - DNA, 33 bp, homo sapiens
tagttcatcaaacaaaytgtgaaggatcattat

SEQ ID NO: 8289 - DNA, 33 bp, homo sapiens
gagctgcagaggacagracgtgaccctaccacc

SEQ ID NO: 8290 - DNA, 33 bp, homo sapiens
aacctgatactgaacarccaaagaaataagcag

SEQ ID NO: 8291 - DNA, 33 bp, homo sapiens
agtaggtttcagagaargtgatcaattctgttt

SEQ ID NO: 8292 - DNA, 33 bp, homo sapiens
ctccttttacttcaccrctgagtttcacatgtt

SEQ ID NO: 8293 - DNA, 33 bp, homo sapiens
cagggtatctccaactwagctatgaaatgggta

SEQ ID NO: 8294 - DNA, 33 bp, homo sapiens
attgatacctgttttayggcacgtgggaaatct

SEQ ID NO: 8295 - DNA, 33 bp, homo sapiens
tgctctctggtgtatcyccacatcctaatacaa

SEQ ID NO: 8296 - DNA, 33 bp, homo sapiens
cagatttttggaacccyattcccagcctcttac

SEQ ID NO: 8297 - DNA, 33 bp, homo sapiens
gttaggagaaaatagtsaaagaggtgaaatgca

SEQ ID NO: 8298 - DNA, 33 bp, homo sapiens
ggcagtgcccagactasagcctgatccgtcctc

SEQ ID NO: 8299 - DNA, 33 bp, homo sapiens
catgaatatggatatargcaagggacacattct

SEQ ID NO: 8300 - DNA, 33 bp, homo sapiens
gttgattgattagtaamaaacatcctgttagca

SEQ ID NO: 8301 - DNA, 33 bp, homo sapiens
agagctatcataaaccratgaccaaaatcatgc

SEQ ID NO: 8302 - DNA, 33 bp, homo sapiens
attcttccaaattctaygtccttgactacctat

SEQ ID NO: 8303 - DNA, 33 bp, homo sapiens
cttggagatacatcagraagaggtcacttttcc

SEQ ID NO: 8304 - DNA, 33 bp, homo sapiens
tttcagtgttatgttgyagtgtaattttatagt

SEQ ID NO: 8305 - DNA, 33 bp, homo sapiens
tttgtttgtttttaaastacagtgctgtctagg

SEQ ID NO: 8306 - DNA, 33 bp, homo sapiens
ggcatataataaactcrcaaaggtcatggatga

SEQ ID NO: 8307 - DNA, 33 bp, homo sapiens
gcacttgttttacaacrgtaagcaaaacagagt

SEQ ID NO: 8308 - DNA, 33 bp, homo sapiens
gaggagaaaggttgaaytgcagctggtcacata

SEQ ID NO: 8309 - DNA, 33 bp, homo sapiens
cacgcccggccaaaccyaatctactcttatcaa

SEQ ID NO: 8310 - DNA, 33 bp, homo sapiens
ttatttacgacacaccrgagaaaaaagttttga

SEQ ID NO: 8311 - DNA, 33 bp, homo sapiens
ctgtgtttagctgcacmaatacctgcaaagact

SEQ ID NO: 8312 - DNA, 33 bp, homo sapiens
ccaagaagggtacatcraaaattacaaaacact

SEQ ID NO: 8313 - DNA, 33 bp, homo sapiens
ttctattgtggacagaraacatattctatatga

SEQ ID NO: 8314 - DNA, 33 bp, homo sapiens
ggacttttcacatatawctatggtgtccttttc

SEQ ID NO: 8315 - DNA, 33 bp, homo sapiens
aaggcctgcctggaccractgcacagaggagca

SEQ ID NO: 8316 - DNA, 33 bp, homo sapiens
ctggattctgtatttcycccccgaaggtttgtt

SEQ ID NO: 8317 - DNA, 33 bp, homo sapiens
ggcactgcccataaacyccattgtcctctggct

SEQ ID NO: 8318 - DNA, 33 bp, homo sapiens
gaaatgttagctgtgaycttatacctagtgcct

SEQ ID NO: 8319 - DNA, 33 bp, homo sapiens
cactttgatttctagcraggaaagagccaggag

SEQ ID NO: 8320 - DNA, 33 bp, homo sapiens
ggtaggtatgtggatasgaccttcttagttaaa

SEQ ID NO: 8321 - DNA, 33 bp, homo sapiens
tagagcagagaccttgrtttttgttaagagtga

SEQ ID NO: 8322 - DNA, 33 bp, homo sapiens
cccaaagaggggggtawggtagaatgcataatg

SEQ ID NO: 8323 - DNA, 33 bp, homo sapiens
agcatgaaaaggcttckcgtgaaaagtctgtgt

SEQ ID NO: 8324 - DNA, 33 bp, homo sapiens
gtagagaacaacgtggkagggaagacagacctg

SEQ ID NO: 8325 - DNA, 33 bp, homo sapiens
acatgcagaaaaacatractatgtaactagaaa

SEQ ID NO: 8326 - DNA, 33 bp, homo sapiens
ggtaaaggaatagagargtggtttccattcttt

SEQ ID NO: 8327 - DNA, 33 bp, homo sapiens
cttcttcaagtgtacayagtgatatggtttgat

SEQ ID NO: 8328 - DNA, 33 bp, homo sapiens
ctgtggaagaaaccaargaactgaaatacccag

SEQ ID NO: 8329 - DNA, 33 bp, homo sapiens
gtaaatccataacatayggcctggcacttagta

SEQ ID NO: 8330 - DNA, 33 bp, homo sapiens
gagctggaagtgctagycattcattcattaagt

SEQ ID NO: 8331 - DNA, 33 bp, homo sapiens
cttgcaaattcacttasgttaggaaatcagttg

SEQ ID NO: 8332 - DNA, 33 bp, homo sapiens
cacacaatgaaaggtawatttttgagccttctc

SEQ ID NO: 8333 - DNA, 33 bp, homo sapiens
ctttgcattttgcatayggaaaaactgatctta

SEQ ID NO: 8334 - DNA, 33 bp, homo sapiens
taatcacagcatcgtayggaggacacttccacc

SEQ ID NO: 8335 - DNA, 33 bp, homo sapiens
ctgcaaaagcctcttcycaagaagtttgtccat

SEQ ID NO: 8336 - DNA, 33 bp, homo sapiens
atgactatttaaacacratgcatacatggtttt

SEQ ID NO: 8337 - DNA, 33 bp, homo sapiens
tgaataaacctgaaaargagcaggaggtaagaa

SEQ ID NO: 8338 - DNA, 33 bp, homo sapiens
ttgttcactcggtggcsatttacaaagtgcaca

SEQ ID NO: 8339 - DNA, 33 bp, homo sapiens
acttgactgtaattggmattgcaagaaaaatct

SEQ ID NO: 8340 - DNA, 33 bp, homo sapiens
gataatagtagaaagtkacagaggtgtcattca

SEQ ID NO: 8341 - DNA, 33 bp, homo sapiens
ggttatttctatgtcaragtcacttcccctttt

SEQ ID NO: 8342 - DNA, 33 bp, homo sapiens
gacaaatccaagcataycctttttttaattgtg

SEQ ID NO: 8343 - DNA, 33 bp, homo sapiens
gtgatgtaaaagaggawgcatggaaagaggcca

SEQ ID NO: 8344 - DNA, 33 bp, homo sapiens
atatttggattgataawtactgaagtcacagat

SEQ ID NO: 8345 - DNA, 33 bp, homo sapiens
gacagttctactaactraaatccatatcaaggt

SEQ ID NO: 8346 - DNA, 33 bp, homo sapiens
gggcattcatgatggakatgctgaaggagtttt

SEQ ID NO: 8347 - DNA, 33 bp, homo sapiens
gtagagacaaaactaayagagaagaagtgatag

SEQ ID NO: 8348 - DNA, 33 bp, homo sapiens
aaatgtaaattacataycttaagtgttggctta

SEQ ID NO: 8349 - DNA, 33 bp, homo sapiens
agagctagaataactgragccagagagtttata

SEQ ID NO: 8350 - DNA, 33 bp, homo sapiens
gtactaagatgactccmgatttcagaaatgcac

SEQ ID NO: 8351 - DNA, 33 bp, homo sapiens
caggcagaaatagatcmaggagccagtcagttt

SEQ ID NO: 8352 - DNA, 33 bp, homo sapiens
caattatttccaattargagatagcagcgacag

SEQ ID NO: 8353 - DNA, 33 bp, homo sapiens
acttacctgacatgtcraagagtttatcaaagc

SEQ ID NO: 8354 - DNA, 33 bp, homo sapiens
tgagtgtaaatggtgasagagaatgatggaaag

SEQ ID NO: 8355 - DNA, 33 bp, homo sapiens
attttcctgaacactayggaaggagggccgatt

SEQ ID NO: 8356 - DNA, 33 bp, homo sapiens
gacaaatacataaatarctaaaccacaaggcac

SEQ ID NO: 8357 - DNA, 33 bp, homo sapiens
ctttccattttaattcraagctaaaagtcaatt

SEQ ID NO: 8358 - DNA, 33 bp, homo sapiens
aaaaatgcttagagaartgattactcctagtca

SEQ ID NO: 8359 - DNA, 33 bp, homo sapiens
aaaccttgtggagtaarcaacatatagtcacag

SEQ ID NO: 8360 - DNA, 33 bp, homo sapiens
tggagcatggacaacasgttggggaagcaggtg

SEQ ID NO: 8361 - DNA, 33 bp, homo sapiens
ggtcgtaatatagggasagatgaagaattgggg

SEQ ID NO: 8362 - DNA, 33 bp, homo sapiens
atccctattcataatcycaacctgcccctgtgt

SEQ ID NO: 8363 - DNA, 33 bp, homo sapiens
aatagctctaagcagaraagggtaattgaatta

SEQ ID NO: 8364 - DNA, 33 bp, homo sapiens
cggagcaggaagcaaasgaatacagggccagca

SEQ ID NO: 8365 - DNA, 33 bp, homo sapiens
atccaagtgttaaccasggctgactctgcttag

SEQ ID NO: 8366 - DNA, 33 bp, homo sapiens
actcttgggaagagtcratttcagggatacttt

SEQ ID NO: 8367 - DNA, 33 bp, homo sapiens
aatatcatcagagccargcttatttgccaagca

SEQ ID NO: 8368 - DNA, 33 bp, homo sapiens
gtgccaaactcagcgcraggaaatttgcattaa

SEQ ID NO: 8369 - DNA, 33 bp, homo sapiens
gtggtcatgtttagctsaatttatacatagaaa

SEQ ID NO: 8370 - DNA, 33 bp, homo sapiens
ggctgtgggacagttaygagttttgggggatgt

SEQ ID NO: 8371 - DNA, 33 bp, homo sapiens
cctgcaaattatcaacmgtaatctcccagttct

SEQ ID NO: 8372 - DNA, 33 bp, homo sapiens
aatctgtaaccatcaaygcgcctcctggtgtct

SEQ ID NO: 8373 - DNA, 33 bp, homo sapiens
aagttgcaatgtgaaarcgggtgaggtgtatgc

SEQ ID NO: 8374 - DNA, 33 bp, homo sapiens
ttctctgcattaatacsagaattttagaaaaca

SEQ ID NO: 8375 - DNA, 33 bp, homo sapiens
acaaaaacaaaaacaarttcagatggatgtggt

SEQ ID NO: 8376 - DNA, 33 bp, homo sapiens
tgcacctagtaactgcrcctttagcaagtcaca

SEQ ID NO: 8377 - DNA, 33 bp, homo sapiens
gcatatctaaaaacacrattttggcacgtttac

SEQ ID NO: 8378 - DNA, 33 bp, homo sapiens
ctagctctacatcaaaytgacaagtggtcagca

SEQ ID NO: 8379 - DNA, 33 bp, homo sapiens
tttggggaaaaagaaargatctagatggatcag

SEQ ID NO: 8380 - DNA, 33 bp, homo sapiens
acctcagaacagcctcraggggatttacggcga

SEQ ID NO: 8381 - DNA, 33 bp, homo sapiens
acaatcaccacaaaacratgggctgacagttac

SEQ ID NO: 8382 - DNA, 33 bp, homo sapiens
gggtgaggagagttcaycactgtagcctggtgg

SEQ ID NO: 8383 - DNA, 33 bp, homo sapiens
ggttgagttgaggagasagcaaacagcctttga

SEQ ID NO: 8384 - DNA, 33 bp, homo sapiens
gactcatgagacatacrctatcctctcagtcct

SEQ ID NO: 8385 - DNA, 33 bp, homo sapiens
atttaacaagccaatcmaactatttaactcttg

SEQ ID NO: 8386 - DNA, 33 bp, homo sapiens
taaggtgcctgcacaayggcgcacctctcagta

SEQ ID NO: 8387 - DNA, 33 bp, homo sapiens
acaataaggaactaatragtgctgggaaataaa

SEQ ID NO: 8388 - DNA, 33 bp, homo sapiens
gaaactgagctaattcraggcagttaatagtga

SEQ ID NO: 8389 - DNA, 33 bp, homo sapiens
tatgaatgtgtagactsaatcactctatgaaga

SEQ ID NO: 8390 - DNA, 33 bp, homo sapiens
gaagtagatggtcttayctctattttatgggag

SEQ ID NO: 8391 - DNA, 33 bp, homo sapiens
ggaaattcgtatcaccrctttgaagaacaagaa

SEQ ID NO: 8392 - DNA, 33 bp, homo sapiens
gaggaaatacagtaaarttgcattgggagacaa

SEQ ID NO: 8393 - DNA, 33 bp, homo sapiens
atccagtgttgtcactraagtaaagagtggcag

SEQ ID NO: 8394 - DNA, 33 bp, homo sapiens
tctaagagtaacgatgscaaaaagataaaatta

SEQ ID NO: 8395 - DNA, 33 bp, homo sapiens
tgagatttttgagaacygagtaggtgcagttct

SEQ ID NO: 8396 - DNA, 33 bp, homo sapiens
ctaccatcttacaaacraagaaactgaaggtcc

SEQ ID NO: 8397 - DNA, 33 bp, homo sapiens
ggctacaagcaggacaygggaggactcacttcc

SEQ ID NO: 8398 - DNA, 33 bp, homo sapiens
agaaccatcaagtccamaaaattactgccatat

SEQ ID NO: 8399 - DNA, 33 bp, homo sapiens
ctgacatgacttctccyaaatacagctgtcttc

SEQ ID NO: 8400 - DNA, 33 bp, homo sapiens
gaggaaacagatcaaaygaactctgcccttcct

SEQ ID NO: 8401 - DNA, 33 bp, homo sapiens
ttctaaccacaaaaaawgtaggtgaggtgatgg

SEQ ID NO: 8402 - DNA, 33 bp, homo sapiens
acttctgttatgttgakccactgagattttgag

SEQ ID NO: 8403 - DNA, 33 bp, homo sapiens
gtccgtgtgctccctcrcgtctcacggtaccgc

SEQ ID NO: 8404 - DNA, 33 bp, homo sapiens
acttgttctgtcccaaycagttccgcatgggca

SEQ ID NO: 8405 - DNA, 33 bp, homo sapiens
ccaaaaccagcaatctyacggccccctttcagc

SEQ ID NO: 8406 - DNA, 33 bp, homo sapiens
ctaatccttcctatgcycataattgttggatgt

SEQ ID NO: 8407 - DNA, 33 bp, homo sapiens
gtctcctcctgttacartggaagctcttggagg

SEQ ID NO: 8408 - DNA, 33 bp, homo sapiens
gtttaagtgaaaaaaaygtgcaacccaggctga

SEQ ID NO: 8409 - DNA, 33 bp, homo sapiens
accatatgcacaagaayaacaccctaagaaatg

SEQ ID NO: 8410 - DNA, 33 bp, homo sapiens
atacttacccaagcaayaagcaaagtaccgaat

SEQ ID NO: 8411 - DNA, 33 bp, homo sapiens
ccctgaagagtgataayaggctgcgttgtgaca

SEQ ID NO: 8412 - DNA, 33 bp, homo sapiens
ggatgcggccgagaacmaggcaaactggctccc

SEQ ID NO: 8413 - DNA, 33 bp, homo sapiens
gtgtttctccacaaaayggcctgaagtcccctg

SEQ ID NO: 8414 - DNA, 33 bp, homo sapiens
acttgttagccgtgtcrcacgtgccattttcag

SEQ ID NO: 8415 - DNA, 33 bp, homo sapiens
tagtcaacaaatcaagraaggccagacactgag

SEQ ID NO: 8416 - DNA, 33 bp, homo sapiens
cgctggaaatcgaggayagcactaactaggaca

SEQ ID NO: 8417 - DNA, 33 bp, homo sapiens
acaaacaccggtttccrcacaccttcagggagg

SEQ ID NO: 8418 - DNA, 33 bp, homo sapiens
gagatttcaatgaagaycaaaagaaagcaatag

SEQ ID NO: 8419 - DNA, 33 bp, homo sapiens
taattagtgtctgtaasgcttcaagtacttaca

SEQ ID NO: 8420 - DNA, 33 bp, homo sapiens
agtgcgtaatgggaaarctgagtgttacctttc

SEQ ID NO: 8421 - DNA, 33 bp, homo sapiens
attagcctaaatttaaygaataccagatgtatg

SEQ ID NO: 8422 - DNA, 33 bp, homo sapiens
aagggaggtaagtgtgraggaaagagatgatgt

SEQ ID NO: 8423 - DNA, 33 bp, homo sapiens
tcttcttctgtaaaacrgggatagaagcattcc

SEQ ID NO: 8424 - DNA, 33 bp, homo sapiens
aaacaaaccaatatgcratcagcaggtataaca

SEQ ID NO: 8425 - DNA, 33 bp, homo sapiens
cactggtgaccactgarggacgattatcaaaat

SEQ ID NO: 8426 - DNA, 33 bp, homo sapiens
acaaggtcatagtcccrcctaacatgacgcagc

SEQ ID NO: 8427 - DNA, 33 bp, homo sapiens
tcccgttaagatcatcrcacaaagaaaagtgag

SEQ ID NO: 8428 - DNA, 33 bp, homo sapiens
aagcctgaaaaacacgrcgcagaatcactccct

SEQ ID NO: 8429 - DNA, 33 bp, homo sapiens
tagtgccacttgcaatsagcagaagcagaagcg

SEQ ID NO: 8430 - DNA, 33 bp, homo sapiens
aaagccagctaaaaaayacaaactcaagcctgg

SEQ ID NO: 8431 - DNA, 33 bp, homo sapiens
ctttagtatacacagarcgaggggaaaacatcc

SEQ ID NO: 8432 - DNA, 33 bp, homo sapiens
tttaagaaggcttttgyagcccttaagccctaa

SEQ ID NO: 8433 - DNA, 33 bp, homo sapiens
aggcaggagttccagcraaggggaggacacgcc

SEQ ID NO: 8434 - DNA, 33 bp, homo sapiens
ctgtcttcactgcgtcygaactgagcttggttc

SEQ ID NO: 8435 - DNA, 33 bp, homo sapiens
gtgtgtttatgcccgartccttagtgtcggcct

SEQ ID NO: 8436 - DNA, 33 bp, homo sapiens
ctttaacatgtcttgcyactctggcattttatc

SEQ ID NO: 8437 - DNA, 33 bp, homo sapiens
cccacaggtggtcttayggccttcttcctttgg

SEQ ID NO: 8438 - DNA, 33 bp, homo sapiens
aatgacacaggataccrcactctgaagatgtaa

SEQ ID NO: 8439 - DNA, 33 bp, homo sapiens
aggccgtgatgactaaytgttccgtgttgtgtt

SEQ ID NO: 8440 - DNA, 33 bp, homo sapiens
ttgtgctaataaagtaygtttggtgttctcctt

SEQ ID NO: 8441 - DNA, 33 bp, homo sapiens
agtcagcaggagcacarggggtgttaggaatac

SEQ ID NO: 8442 - DNA, 33 bp, homo sapiens
gtctcaaaaacaaacayaacagcctttcctggc

SEQ ID NO: 8443 - DNA, 33 bp, homo sapiens
caggccttgggtaatcrcatcactattttggat

SEQ ID NO: 8444 - DNA, 33 bp, homo sapiens
gttttcaactaacaaayacaagtcttttgtctt

SEQ ID NO: 8445 - DNA, 33 bp, homo sapiens
ccattccatgcagaacyacagccatttccccag

SEQ ID NO: 8446 - DNA, 33 bp, homo sapiens
ggagaacagcacagagraagtcatagggagggc

SEQ ID NO: 8447 - DNA, 33 bp, homo sapiens
cttgttcattgagtaayctggccttgctcattg

SEQ ID NO: 8448 - DNA, 33 bp, homo sapiens
gcatgaacagacctcaygttgtccattcgtcca

SEQ ID NO: 8449 - DNA, 33 bp, homo sapiens
caatacatcgttgttaygtttgctttaaacaag

SEQ ID NO: 8450 - DNA, 33 bp, homo sapiens
tcaggacctaaaccgcrctgcgaggccctcacc

SEQ ID NO: 8451 - DNA, 33 bp, homo sapiens
tgggtccgccttctaasctgcgattaccttcac

SEQ ID NO: 8452 - DNA, 33 bp, homo sapiens
aattcaatccacactayaccatcttgccctcag

SEQ ID NO: 8453 - DNA, 33 bp, homo sapiens
tagaaataaagcctcaygcaggtttcaaagtcg

SEQ ID NO: 8454 - DNA, 33 bp, homo sapiens
ggtgatgacggtacaaygggacagacaaggagt

SEQ ID NO: 8455 - DNA, 33 bp, homo sapiens
cacatgaaattcctgayggcaaaaatcagactc

SEQ ID NO: 8456 - DNA, 33 bp, homo sapiens
cccagccttaaccataygcaagcactgtttagc

SEQ ID NO: 8457 - DNA, 33 bp, homo sapiens
tcttcctagagattccyataaacacaggtgtgt

SEQ ID NO: 8458 - DNA, 33 bp, homo sapiens
taggtcaatggatatayagatgataaagagatg

SEQ ID NO: 8459 - DNA, 33 bp, homo sapiens
tggctgtattgagatarcttgaatcagggaaga

SEQ ID NO: 8460 - DNA, 33 bp, homo sapiens
gttgctttttagacaayggtgtgtatggaaaca

SEQ ID NO: 8461 - DNA, 33 bp, homo sapiens
tggtgttaatggtcgakgaactgcatggtccat

SEQ ID NO: 8462 - DNA, 33 bp, homo sapiens
aagatttttgattgaarggatatattgttgtaa

SEQ ID NO: 8463 - DNA, 33 bp, homo sapiens
taattttaatgctccaygtctttcccgaaagcc

SEQ ID NO: 8464 - DNA, 33 bp, homo sapiens
tcatacactttgaaacygaaaacatttaaactc

SEQ ID NO: 8465 - DNA, 33 bp, homo sapiens
cattctttggccaggcragaaacctctatcatg

SEQ ID NO: 8466 - DNA, 33 bp, homo sapiens
tgtttctatctttcacraagcttacataattct

SEQ ID NO: 8467 - DNA, 33 bp, homo sapiens
actgctgaaaaaactarctgcaaatttattgaa

SEQ ID NO: 8468 - DNA, 33 bp, homo sapiens
aatttgaaggcattgawagaagagctgtgtgtt

SEQ ID NO: 8469 - DNA, 33 bp, homo sapiens
acaaatatggccatcakgcagacacgttgccca

SEQ ID NO: 8470 - DNA, 33 bp, homo sapiens
tcctggaagaagagacrcatgtaaactttagtt

SEQ ID NO: 8471 - DNA, 33 bp, homo sapiens
tgtttccacttgaatargctaaaaagggattcc

SEQ ID NO: 8472 - DNA, 33 bp, homo sapiens
acaggcacgtgcaaggwagtaagcaagagagaa

SEQ ID NO: 8473 - DNA, 33 bp, homo sapiens
tgatattcaagatcccygaattaggtagttcag

SEQ ID NO: 8474 - DNA, 33 bp, homo sapiens
gtcagacgagggctgcygcagagacggtagacc

SEQ ID NO: 8475 - DNA, 33 bp, homo sapiens
ggcatcaagctgttcayagggccggtttctcct

SEQ ID NO: 8476 - DNA, 33 bp, homo sapiens
aaaggaaatacctaaamcactcagacttagcct

SEQ ID NO: 8477 - DNA, 33 bp, homo sapiens
tggacctgacgacatckgagaaaaaaaaaattg

SEQ ID NO: 8478 - DNA, 33 bp, homo sapiens
ggctgcggcaaccaagyactgtggatcaggcgg

SEQ ID NO: 8479 - DNA, 33 bp, homo sapiens
gaacaacagccaaaccyggatccatgacggagc

SEQ ID NO: 8480 - DNA, 33 bp, homo sapiens
cttctcttgttgtcctraaattttcagcagaag

SEQ ID NO: 8481 - DNA, 33 bp, homo sapiens
ccctttgttgacgacargcacatttatgggtga

SEQ ID NO: 8482 - DNA, 33 bp, homo sapiens
aattagtttctgaaccrcactgtttgctggtaa

SEQ ID NO: 8483 - DNA, 33 bp, homo sapiens
tttctcctgataaaaaktgaagagtttggaaga

SEQ ID NO: 8484 - DNA, 33 bp, homo sapiens
tttgaaattttttgaaygccgacatgaggctga

SEQ ID NO: 8485 - DNA, 33 bp, homo sapiens
aattacatatttaaccratctttgactaatatt

SEQ ID NO: 8486 - DNA, 33 bp, homo sapiens
tccatcaaccaatgaasagatgagttgtaggca

SEQ ID NO: 8487 - DNA, 33 bp, homo sapiens
aatcaagaagtaagaakaagtataagcagctga

SEQ ID NO: 8488 - DNA, 33 bp, homo sapiens
cttccaggtctaccaarggcattcctagagtta

SEQ ID NO: 8489 - DNA, 33 bp, homo sapiens
ttgtcagaagcctgatkagagtgatggagaggt

SEQ ID NO: 8490 - DNA, 33 bp, homo sapiens
ccgaaaaaaacaaacarcgttcattcacctgtc

SEQ ID NO: 8491 - DNA, 33 bp, homo sapiens
ataaatttaagagagcrcggcaggttttggaat

SEQ ID NO: 8492 - DNA, 33 bp, homo sapiens
ccagccagagctggtcrcatcacatgtcactgt

SEQ ID NO: 8493 - DNA, 33 bp, homo sapiens
aaaggttttgagttcartagttgatggagaccc

SEQ ID NO: 8494 - DNA, 33 bp, homo sapiens
ctcatttctgggcgtgsaccaaactaactatgg

SEQ ID NO: 8495 - DNA, 33 bp, homo sapiens
gcttctaggctgagaaktcaggcacacaggggg

SEQ ID NO: 8496 - DNA, 33 bp, homo sapiens
gaaagtctgttcaagargagaatccgtgccact

SEQ ID NO: 8497 - DNA, 33 bp, homo sapiens
atttactcgaaagaaakgaaattaggtgttcca

SEQ ID NO: 8498 - DNA, 33 bp, homo sapiens
aacacaaagatatatgratggcatttagagaat

SEQ ID NO: 8499 - DNA, 33 bp, homo sapiens
gcaaacagcagactccragaccactggaggcct

SEQ ID NO: 8500 - DNA, 33 bp, homo sapiens
atactaagagtggtccwagaaaacagaaggcca

SEQ ID NO: 8501 - DNA, 33 bp, homo sapiens
ggaaaaaggcaatgatyagtcctctggaaggcg

SEQ ID NO: 8502 - DNA, 33 bp, homo sapiens
acacaattgcttctcckatgaaagccacttcca

SEQ ID NO: 8503 - DNA, 33 bp, homo sapiens
tcctgtcttggcctacygaggagtttgaactac

SEQ ID NO: 8504 - DNA, 33 bp, homo sapiens
actcaggaaatgccaarcgttttcgaagccctg

SEQ ID NO: 8505 - DNA, 33 bp, homo sapiens
aaggagggaaggagacyatttccaaatgtaaat

SEQ ID NO: 8506 - DNA, 33 bp, homo sapiens
tatgtggtgcttgtctraatgtaatctaactac

SEQ ID NO: 8507 - DNA, 33 bp, homo sapiens
tatggtgaatagtggarggggtgtatttgaaga

SEQ ID NO: 8508 - DNA, 33 bp, homo sapiens
gctaacattttcttccsctataaactagtgttc

SEQ ID NO: 8509 - DNA, 33 bp, homo sapiens
aaatgtcacttacaacsgctcccaggcagaggc

SEQ ID NO: 8510 - DNA, 33 bp, homo sapiens
attcttttcatggctakagtaacatggtccctg

SEQ ID NO: 8511 - DNA, 33 bp, homo sapiens
ttgttcctagaagttargtcagaagatagaagt

SEQ ID NO: 8512 - DNA, 33 bp, homo sapiens
agtccaataggtataawctgtctctggttgtac

SEQ ID NO: 8513 - DNA, 33 bp, homo sapiens
aaccacaggagagctgractcggtgaattactt

SEQ ID NO: 8514 - DNA, 33 bp, homo sapiens
aatagaccaggtatgaraaggttggcttggact

SEQ ID NO: 8515 - DNA, 33 bp, homo sapiens
gatttggaaatacaaargcaaatagcagaaaaa

SEQ ID NO: 8516 - DNA, 33 bp, homo sapiens
tcagggagattccgggraaatggtagttggcac

SEQ ID NO: 8517 - DNA, 33 bp, homo sapiens
cagcagttctgattcaracaaaaaatgtactgc

SEQ ID NO: 8518 - DNA, 33 bp, homo sapiens
aaataattcttctaaargccaatggggattcta

SEQ ID NO: 8519 - DNA, 33 bp, homo sapiens
agagatacagggaagaktagcatgactaccgtg

SEQ ID NO: 8520 - DNA, 33 bp, homo sapiens
atatttgttgagcaaayaaatgaatgcacacac

SEQ ID NO: 8521 - DNA, 33 bp, homo sapiens
atgctgggttgctattraaatgacgtggcaaac

SEQ ID NO: 8522 - DNA, 33 bp, homo sapiens
ttcctatttactttccmatgcatctgtagaaat

SEQ ID NO: 8523 - DNA, 33 bp, homo sapiens
tctgcctcaatgatgaygtttacagcaccataa

SEQ ID NO: 8524 - DNA, 33 bp, homo sapiens
aggtgaatttcacaggrcagggactaaacactc

SEQ ID NO: 8525 - DNA, 33 bp, homo sapiens
acttccaatctggagargatcaaatgaggctgc

SEQ ID NO: 8526 - DNA, 33 bp, homo sapiens
aaaagaaatcttctctraccttccaactctaaa

SEQ ID NO: 8527 - DNA, 33 bp, homo sapiens
aatcttcttttccgtaracaaatcttggaagcc

SEQ ID NO: 8528 - DNA, 33 bp, homo sapiens
aatcaacagctgggtcycattctttttggatct

SEQ ID NO: 8529 - DNA, 33 bp, homo sapiens
cgcttcatttgtgtcakacttctttggcaagag

SEQ ID NO: 8530 - DNA, 33 bp, homo sapiens
agctaccttcacataaycctacaagttaacaaa

SEQ ID NO: 8531 - DNA, 33 bp, homo sapiens
gtggtcagtgtcaaagscctcacttttcataac

SEQ ID NO: 8532 - DNA, 33 bp, homo sapiens
aatatcaattataccaracacttccaatgcata

SEQ ID NO: 8533 - DNA, 33 bp, homo sapiens
tcagcagaaactcaaaraatttacaggctgaaa

SEQ ID NO: 8534 - DNA, 33 bp, homo sapiens
gcttatgatttatagayggatggatttactgca

SEQ ID NO: 8535 - DNA, 33 bp, homo sapiens
ggtctctttctgagaaytctaatggtaaaacac

SEQ ID NO: 8536 - DNA, 33 bp, homo sapiens
atctaatagtcactcartaagtatgttttgaat

SEQ ID NO: 8537 - DNA, 33 bp, homo sapiens
cacattccatcatcaaktaaacatttaaacagc

SEQ ID NO: 8538 - DNA, 33 bp, homo sapiens
actttgtgtatagaacwatcattgagctgtcag

SEQ ID NO: 8539 - DNA, 33 bp, homo sapiens
tatctcggaaatgttaygacaatgggcttagaa

SEQ ID NO: 8540 - DNA, 33 bp, homo sapiens
taaggtaggtgcccttmaaaggatgactagacc

SEQ ID NO: 8541 - DNA, 33 bp, homo sapiens
atttgaaaccttctcaratctcagtctgctggt

SEQ ID NO: 8542 - DNA, 33 bp, homo sapiens
ttaggtgataaagtaaycatttgagtgaaattt

SEQ ID NO: 8543 - DNA, 33 bp, homo sapiens
gcaaatgtgatacttaygctgcctgttcttcca

SEQ ID NO: 8544 - DNA, 33 bp, homo sapiens
gttatctttaggccaawctgatcctgctatgag

SEQ ID NO: 8545 - DNA, 33 bp, homo sapiens
ctgataggtacaagtcrctattcttgatgctgg

SEQ ID NO: 8546 - DNA, 33 bp, homo sapiens
ggacaacgtcaaaggayagagatgtaatggtca

SEQ ID NO: 8547 - DNA, 33 bp, homo sapiens
ctgtagcaagcagaacyctaacgccttctagga

SEQ ID NO: 8548 - DNA, 33 bp, homo sapiens
tgttttcacttgtaatraaaccataacattttg

SEQ ID NO: 8549 - DNA, 33 bp, homo sapiens
ttctagtgtatattcargttaggaacccaatga

SEQ ID NO: 8550 - DNA, 33 bp, homo sapiens
aaatgaatatgctaccrgcttgattgaatgtgc

SEQ ID NO: 8551 - DNA, 33 bp, homo sapiens
gtgatttaaagcaggtracataaaaaccatgca

SEQ ID NO: 8552 - DNA, 33 bp, homo sapiens
ttttacaattacctgaragcatcacatttgctg

SEQ ID NO: 8553 - DNA, 33 bp, homo sapiens
taattggtgcatgacastgatttggatattgaa

SEQ ID NO: 8554 - DNA, 33 bp, homo sapiens
aagtggtcgacaataargcttccatagcaacca

SEQ ID NO: 8555 - DNA, 33 bp, homo sapiens
caggttactcataaaarcaaaacatcagtgttt

SEQ ID NO: 8556 - DNA, 33 bp, homo sapiens
tagcacaacagggcaaytatcgtcaataataat

SEQ ID NO: 8557 - DNA, 33 bp, homo sapiens
tgttcactcttctatcrctgcataatagttatt

SEQ ID NO: 8558 - DNA, 33 bp, homo sapiens
ccacatagccaacctcrccagggctgagcaggt

SEQ ID NO: 8559 - DNA, 33 bp, homo sapiens
ttgagaatgctacttgraattaaatgtttatag

SEQ ID NO: 8560 - DNA, 33 bp, homo sapiens
aaccatactgttctgawaataaaatgctttcta

SEQ ID NO: 8561 - DNA, 33 bp, homo sapiens
agtttagtgggtatcasaatcaccaagttggga

SEQ ID NO: 8562 - DNA, 33 bp, homo sapiens
attttaaatgttggtarcttacagccaggcacg

SEQ ID NO: 8563 - DNA, 33 bp, homo sapiens
aataatggctggtaacratttaattatgcccac

SEQ ID NO: 8564 - DNA, 33 bp, homo sapiens
cggcatacaagtccaaytgaaatgtatcttttc

SEQ ID NO: 8565 - DNA, 33 bp, homo sapiens
cagagaaggccaaataygctcccgtaaccgatc

SEQ ID NO: 8566 - DNA, 33 bp, homo sapiens
gaatgtgttccatgcamccagaactgccaacat

SEQ ID NO: 8567 - DNA, 33 bp, homo sapiens
ctgcagtggagctggamggaggaacggacagtt

SEQ ID NO: 8568 - DNA, 33 bp, homo sapiens
catggatccatttcaargttgatttttagcaga

SEQ ID NO: 8569 - DNA, 33 bp, homo sapiens
ttcacaaaagaggatayctcaaaggccaaaaac

SEQ ID NO: 8570 - DNA, 33 bp, homo sapiens
gtggtctctctctaaastatctattgcactctc

SEQ ID NO: 8571 - DNA, 33 bp, homo sapiens
tttataactagtttgaytattgggtgcttcgtt

SEQ ID NO: 8572 - DNA, 33 bp, homo sapiens
tagtgcaaacactgtayattgctatttgtagtg

SEQ ID NO: 8573 - DNA, 33 bp, homo sapiens
acagcaacagactggaragagaaatagaatcca

SEQ ID NO: 8574 - DNA, 33 bp, homo sapiens
ggctgtcctagtctacrcccagcagtgtgaggg

SEQ ID NO: 8575 - DNA, 33 bp, homo sapiens
tggaagtgagcccatcragagagtgttctctac

SEQ ID NO: 8576 - DNA, 33 bp, homo sapiens
ccttggccactagagcyagttgatgctgccgaa

SEQ ID NO: 8577 - DNA, 33 bp, homo sapiens
agagtccctgacttacrgatgaaatggtgactg

SEQ ID NO: 8578 - DNA, 33 bp, homo sapiens
gagcacagaggattaayggtagtcacagagagc

SEQ ID NO: 8579 - DNA, 33 bp, homo sapiens
tgagcttgctagatgayacagagaagcttggtt

SEQ ID NO: 8580 - DNA, 33 bp, homo sapiens
aagaatttgtatagtayctttacattttgcaaa

SEQ ID NO: 8581 - DNA, 33 bp, homo sapiens
actcaggttttgattgratacttgggggccagt

SEQ ID NO: 8582 - DNA, 33 bp, homo sapiens
agcctcgtacaggaaakagagaccaacacaaat

SEQ ID NO: 8583 - DNA, 33 bp, homo sapiens
aaccacctggaattaaygcagatttcacaggtt

SEQ ID NO: 8584 - DNA, 33 bp, homo sapiens
cctctaatggaagaatyagagcgggtcccacag

SEQ ID NO: 8585 - DNA, 33 bp, homo sapiens
tttatgggaggatgaawtcagtataaagatagc

SEQ ID NO: 8586 - DNA, 33 bp, homo sapiens
tgggcctctgaataacygggtttcattactaca

SEQ ID NO: 8587 - DNA, 33 bp, homo sapiens
tttgcactggagatgaraagagtttatgataaa

SEQ ID NO: 8588 - DNA, 33 bp, homo sapiens
ttcagaccaacaaagaragactagagatttact

SEQ ID NO: 8589 - DNA, 33 bp, homo sapiens
tgtttctaagcaccccracattttaggactcct

SEQ ID NO: 8590 - DNA, 33 bp, homo sapiens
acgtgacctaccaaatracccattggttagtta

SEQ ID NO: 8591 - DNA, 33 bp, homo sapiens
aactgtgttaaccttayagtgacattacttaaa

SEQ ID NO: 8592 - DNA, 33 bp, homo sapiens
tccactaacagtaggaygggtaagtaaacagcg

SEQ ID NO: 8593 - DNA, 33 bp, homo sapiens
cttgacaataaaagtcmgaaggaagattcgagt

SEQ ID NO: 8594 - DNA, 33 bp, homo sapiens
gtcctaaaagatggcartccccctgtgtggcaa

SEQ ID NO: 8595 - DNA, 33 bp, homo sapiens
aagtgaatatgattccygatacaggtcaaagca

SEQ ID NO: 8596 - DNA, 33 bp, homo sapiens
ccattaaaataccacayggactaaggataatta

SEQ ID NO: 8597 - DNA, 33 bp, homo sapiens
tccaatctctgccttcyatgttctaagggattc

SEQ ID NO: 8598 - DNA, 33 bp, homo sapiens
tagtactgccaaatagragaccggtgaagttca

SEQ ID NO: 8599 - DNA, 33 bp, homo sapiens
gggatgatggcaaacakataaaccctcggcagg

SEQ ID NO: 8600 - DNA, 33 bp, homo sapiens
cgaaggaaaataattaygtgctaaagtgaagtt

SEQ ID NO: 8601 - DNA, 33 bp, homo sapiens
ttgaccacgtttatgargtatctacaacaggca

SEQ ID NO: 8602 - DNA, 33 bp, homo sapiens
cctgtgtggtgctatgyagcaataaaacagaca

SEQ ID NO: 8603 - DNA, 33 bp, homo sapiens
agcatgcccaactcaawgaagatcttgaaaata

SEQ ID NO: 8604 - DNA, 33 bp, homo sapiens
ttggcatgccttccccwctcggtttctaaccat

SEQ ID NO: 8605 - DNA, 33 bp, homo sapiens
gggcctgaagtttgtaygatttgggaagcttgg

SEQ ID NO: 8606 - DNA, 33 bp, homo sapiens
tggtatgggtttcagayactgtgatgacaactt

SEQ ID NO: 8607 - DNA, 33 bp, homo sapiens
cctggcaatgggataayggagacggcatctccg

SEQ ID NO: 8608 - DNA, 33 bp, homo sapiens
catggggtctcattaaycacctttctattataa

SEQ ID NO: 8609 - DNA, 33 bp, homo sapiens
ggtaagtagccaaacayggtgaaagatcagcag

SEQ ID NO: 8610 - DNA, 33 bp, homo sapiens
aggaatgcaggtttgartaatatttctaaatag

SEQ ID NO: 8611 - DNA, 33 bp, homo sapiens
cgttcacactcagtgcygcacgaatacagtgtg

SEQ ID NO: 8612 - DNA, 33 bp, homo sapiens
aatagggtactaacagragaatagtgttgctgt

SEQ ID NO: 8613 - DNA, 33 bp, homo sapiens
ggctgtcaggataggaractgttgtattcaaaa

SEQ ID NO: 8614 - DNA, 33 bp, homo sapiens
catttttaaaatggggrcatcatctttccttat

SEQ ID NO: 8615 - DNA, 33 bp, homo sapiens
agcaacagagaacaaargtaatgaataagaaac

SEQ ID NO: 8616 - DNA, 33 bp, homo sapiens
aaaatgcctccagacayagtcaaattttctctg

SEQ ID NO: 8617 - DNA, 33 bp, homo sapiens
gtagtacaaggtgttayctatagattctccctg

SEQ ID NO: 8618 - DNA, 33 bp, homo sapiens
tcagattctgggttcayggagaaatggatagaa

SEQ ID NO: 8619 - DNA, 33 bp, homo sapiens
tgagaagatgcaagacygtagccctggttaaac

SEQ ID NO: 8620 - DNA, 33 bp, homo sapiens
agaaccacacagctgaygaaaaagcaagctgga

SEQ ID NO: 8621 - DNA, 33 bp, homo sapiens
agtattataccgaagayacaaggggctcttcct

SEQ ID NO: 8622 - DNA, 33 bp, homo sapiens
agatacatacaggtgasctataaagaggtacat

SEQ ID NO: 8623 - DNA, 33 bp, homo sapiens
ttattatatggagataygtggctacaaaagtat

SEQ ID NO: 8624 - DNA, 33 bp, homo sapiens
caattccgttagttaayagacaatgtccatgcc

SEQ ID NO: 8625 - DNA, 33 bp, homo sapiens
cccaccctcaagtagawgcaggatgcctggtga

SEQ ID NO: 8626 - DNA, 33 bp, homo sapiens
tggctgacctaagtaaycctggtgactattctt

SEQ ID NO: 8627 - DNA, 33 bp, homo sapiens
aaaaacgatgatgtgtyaaacagttaataagag

SEQ ID NO: 8628 - DNA, 33 bp, homo sapiens
agataacgtgaaattarctgggaaatccactag

SEQ ID NO: 8629 - DNA, 33 bp, homo sapiens
ctttccttttcagccaytgatcgtttccctgcc

SEQ ID NO: 8630 - DNA, 33 bp, homo sapiens
tgtgtaaattgttgaawtggttggatgaatgag

SEQ ID NO: 8631 - DNA, 33 bp, homo sapiens
ttgttcaagataccacyattcccacttctggct

SEQ ID NO: 8632 - DNA, 33 bp, homo sapiens
agtgatttcagaatgcmcttatgctttttttat

SEQ ID NO: 8633 - DNA, 33 bp, homo sapiens
aaatttgaagagagtayaggaaagtagcctatg

SEQ ID NO: 8634 - DNA, 33 bp, homo sapiens
attcctccataaggacwccatccacgggtacca

SEQ ID NO: 8635 - DNA, 33 bp, homo sapiens
taatacagattgctcayatagagaacaaatagg

SEQ ID NO: 8636 - DNA, 33 bp, homo sapiens
ttcaaaattgcttagayggtaaatgtcaaatgt

SEQ ID NO: 8637 - DNA, 33 bp, homo sapiens
cactggaacatcttcaragaagaccacaatgca

SEQ ID NO: 8638 - DNA, 33 bp, homo sapiens
gtatttactaatgaagyagaagctacatgagct

SEQ ID NO: 8639 - DNA, 33 bp, homo sapiens
gtggacagtggtgccaytgaataggaaatacag

SEQ ID NO: 8640 - DNA, 33 bp, homo sapiens
caagaagactgttggasgtatactttctgtatt

SEQ ID NO: 8641 - DNA, 33 bp, homo sapiens
aagacgcaaacacaaaytgatttataataatcc

SEQ ID NO: 8642 - DNA, 33 bp, homo sapiens
tcttaatccaagtccaytgaaattgttccttaa

SEQ ID NO: 8643 - DNA, 33 bp, homo sapiens
tggtttaaaaagtaagyccagttgtgaagtttc

SEQ ID NO: 8644 - DNA, 33 bp, homo sapiens
catgcactaggggagasgaagctaatttaatgt

SEQ ID NO: 8645 - DNA, 33 bp, homo sapiens
atgaatacatttttccrgaatttttctagccgt

SEQ ID NO: 8646 - DNA, 33 bp, homo sapiens
ttgagaataaacaccastaggaaccaataaatg

SEQ ID NO: 8647 - DNA, 33 bp, homo sapiens
aagtattaagtgaacartggccaaatgctatgg

SEQ ID NO: 8648 - DNA, 33 bp, homo sapiens
atgtaagcagtatttcycagcccactcatttgt

SEQ ID NO: 8649 - DNA, 33 bp, homo sapiens
caatttggccaatgaakactagagaggatacac

SEQ ID NO: 8650 - DNA, 33 bp, homo sapiens
agcaaaactacagtgayggaaagcagattacta

SEQ ID NO: 8651 - DNA, 33 bp, homo sapiens
ggcaggttaaaggcacrgtcctccagaatgtta

SEQ ID NO: 8652 - DNA, 33 bp, homo sapiens
aacatcagacaataaarggcagtgaccactgag

SEQ ID NO: 8653 - DNA, 33 bp, homo sapiens
cacaccctcacgcccayagcaggtcagcttcct

SEQ ID NO: 8654 - DNA, 33 bp, homo sapiens
ttttctgttcctcctaycccatgctcattcatg

SEQ ID NO: 8655 - DNA, 33 bp, homo sapiens
ccacagggaatgttagrcaaccatcagttgatg

SEQ ID NO: 8656 - DNA, 33 bp, homo sapiens
tgtatagcctcctctcrcactgagtcaaagctg

SEQ ID NO: 8657 - DNA, 33 bp, homo sapiens
ctaaagcaagagtagayattaacaggttggggt

SEQ ID NO: 8658 - DNA, 33 bp, homo sapiens
ttctacaaaaataatargcacaatcttaataat

SEQ ID NO: 8659 - DNA, 33 bp, homo sapiens
ctgcccaagtaaacacragtccagggctgttca

SEQ ID NO: 8660 - DNA, 33 bp, homo sapiens
ggagtcttacttggacsaatctctgcacttatg

SEQ ID NO: 8661 - DNA, 33 bp, homo sapiens
atctctcacagaaaaayctttttactcacatcc

SEQ ID NO: 8662 - DNA, 33 bp, homo sapiens
tagctatcaccctgtaygtaagtaatcattgac

SEQ ID NO: 8663 - DNA, 33 bp, homo sapiens
tagcagaggtagaaaaygggccaggagcagtgg

SEQ ID NO: 8664 - DNA, 33 bp, homo sapiens
tatgtattactgcacaycttttccatgcctcct

SEQ ID NO: 8665 - DNA, 33 bp, homo sapiens
tggaaaacaggacttakatcaacacaagcaatc

SEQ ID NO: 8666 - DNA, 33 bp, homo sapiens
ttgcctcatccacttasaacaagagtcatcttt

SEQ ID NO: 8667 - DNA, 33 bp, homo sapiens
ctttcactaattggaayatacagtggacaatca

SEQ ID NO: 8668 - DNA, 33 bp, homo sapiens
tttatttcttttgtcayatgtcacttctgcaga

SEQ ID NO: 8669 - DNA, 33 bp, homo sapiens
tgaagacaagggaccaytcttgtgcacacaccc

SEQ ID NO: 8670 - DNA, 33 bp, homo sapiens
tgctcaccaaagaaaakgagaaatcaatgacag

SEQ ID NO: 8671 - DNA, 33 bp, homo sapiens
aatcaagactcgtgatsagagtgcagggaccaa

SEQ ID NO: 8672 - DNA, 33 bp, homo sapiens
agattagactttctcgkatctgacagattaacg

SEQ ID NO: 8673 - DNA, 33 bp, homo sapiens
gtttacagtggttttcrgaaaaagcaaggtatt

SEQ ID NO: 8674 - DNA, 33 bp, homo sapiens
gataaaaaggtaagacrgaccacttcattctaa

SEQ ID NO: 8675 - DNA, 33 bp, homo sapiens
aagtaaatataagaaaytactgcacttggcacc

SEQ ID NO: 8676 - DNA, 33 bp, homo sapiens
caggataattgatcacrgtaccaaatgctgcag

SEQ ID NO: 8677 - DNA, 33 bp, homo sapiens
tgatttaggtctcagawattttgtgtttagcat

SEQ ID NO: 8678 - DNA, 33 bp, homo sapiens
gtgggaaaagaggttcygaaaagctgctggtgg

SEQ ID NO: 8679 - DNA, 33 bp, homo sapiens
agatccagtggcattayggtggtttgcattctt

SEQ ID NO: 8680 - DNA, 33 bp, homo sapiens
caaaatgctttcgtagrcatttcaccatccgag

SEQ ID NO: 8681 - DNA, 33 bp, homo sapiens
tcacggttaagagacayggactttgaccttttg

SEQ ID NO: 8682 - DNA, 33 bp, homo sapiens
tctgcacagaccaatgycactttatacagagac

SEQ ID NO: 8683 - DNA, 33 bp, homo sapiens
tcaggagagggacagasaggctacgtcactaca

SEQ ID NO: 8684 - DNA, 33 bp, homo sapiens
aaccacccacaggataygctctctaaagcgaaa

SEQ ID NO: 8685 - DNA, 33 bp, homo sapiens
acttactaaacccacasaagcataagtaatctg

SEQ ID NO: 8686 - DNA, 33 bp, homo sapiens
tttgccttatactgaaytggacttttataactt

SEQ ID NO: 8687 - DNA, 33 bp, homo sapiens
tcttaaaaagagcaaaygtccctcttatatccc

SEQ ID NO: 8688 - DNA, 33 bp, homo sapiens
gtatggaaaacccaacrggaatctacatactag

SEQ ID NO: 8689 - DNA, 33 bp, homo sapiens
gagctgaaagcatcctragagactgaaaaagaa

SEQ ID NO: 8690 - DNA, 33 bp, homo sapiens
acaaagtctacttcaaygtatggcccatgacag

SEQ ID NO: 8691 - DNA, 33 bp, homo sapiens
atctgggatgtgaaaasgtttctggagaggcat

SEQ ID NO: 8692 - DNA, 33 bp, homo sapiens
gagcacatgaagggcaratctccagtctaagaa

SEQ ID NO: 8693 - DNA, 33 bp, homo sapiens
gacaatcagaaagtgcraataaataggcactag

SEQ ID NO: 8694 - DNA, 33 bp, homo sapiens
gtggccgtccctgcagmagcatggccctgagga

SEQ ID NO: 8695 - DNA, 33 bp, homo sapiens
tgattctaaggatctcrattccctctctgtcat

SEQ ID NO: 8696 - DNA, 33 bp, homo sapiens
agtcatctttggagaartcagccacaggatcct

SEQ ID NO: 8697 - DNA, 33 bp, homo sapiens
caaagcagaatggtgcragatttcatcacacta

SEQ ID NO: 8698 - DNA, 33 bp, homo sapiens
cacagaaagtttacaartaagaccttgcatcta

SEQ ID NO: 8699 - DNA, 33 bp, homo sapiens
aacaaaaataccaaaaygaagcatagccatagg

SEQ ID NO: 8700 - DNA, 33 bp, homo sapiens
aatgaaagcccagtgcrgatgatggaaagaaca

SEQ ID NO: 8701 - DNA, 33 bp, homo sapiens
gtgttcacaaagacacsgcttactggcccgtat

SEQ ID NO: 8702 - DNA, 33 bp, homo sapiens
agaggagaagcagggartagcaatgccgtattc

SEQ ID NO: 8703 - DNA, 33 bp, homo sapiens
ttcatttctactttgakctttgcctctgagctt

SEQ ID NO: 8704 - DNA, 33 bp, homo sapiens
atagattcagaaaatcraggctagagcagtttt

SEQ ID NO: 8705 - DNA, 33 bp, homo sapiens
agaagtaataccttacracagaatagttctata

SEQ ID NO: 8706 - DNA, 33 bp, homo sapiens
agttgagtgtttggaaytcattttagattattt

SEQ ID NO: 8707 - DNA, 33 bp, homo sapiens
gtccccataaaaccacmaaagagttgagtgttt

SEQ ID NO: 8708 - DNA, 33 bp, homo sapiens
atgggcagcaaagaaakttaccaagacagttgt

SEQ ID NO: 8709 - DNA, 33 bp, homo sapiens
ttaactcacctattaartgggaatcataatact

SEQ ID NO: 8710 - DNA, 33 bp, homo sapiens
ggtcacccaagtttcamatcctttgcctcaaat

SEQ ID NO: 8711 - DNA, 33 bp, homo sapiens
caaggtcagtggcccarcaagctgaatatttca

SEQ ID NO: 8712 - DNA, 33 bp, homo sapiens
acactcagggttcaaaygtgaagttacctcaat

SEQ ID NO: 8713 - DNA, 33 bp, homo sapiens
gctcgagggaccattcrcttttgttttcttata

SEQ ID NO: 8714 - DNA, 33 bp, homo sapiens
ggctcacaagaacctawccttgaatatcgccta

SEQ ID NO: 8715 - DNA, 33 bp, homo sapiens
tattgcatgatattgaygtttgggtttctaatg

SEQ ID NO: 8716 - DNA, 33 bp, homo sapiens
ccaatcacaagccctakgttgtattaccacccg

SEQ ID NO: 8717 - DNA, 33 bp, homo sapiens
gactaagacacttgtgragaaactggtttaatg

SEQ ID NO: 8718 - DNA, 33 bp, homo sapiens
gtgtaggagggttccayattcaccatttcttgc

SEQ ID NO: 8719 - DNA, 33 bp, homo sapiens
gaaggacataagttccrgagtgagactacctga

SEQ ID NO: 8720 - DNA, 33 bp, homo sapiens
tagcattctagaaaacygcatggtgtctgctgg

SEQ ID NO: 8721 - DNA, 33 bp, homo sapiens
agtgattgtatatatamgcttttcaggtctcag

SEQ ID NO: 8722 - DNA, 33 bp, homo sapiens
cagaggtacagttaagraaaacaaggattgaga

SEQ ID NO: 8723 - DNA, 33 bp, homo sapiens
tgaggattccaagagayagaatgtgagagaaga

SEQ ID NO: 8724 - DNA, 33 bp, homo sapiens
ctacagacttgcttgakgaggaattgccataaa

SEQ ID NO: 8725 - DNA, 33 bp, homo sapiens
ggactactcgcaagccraggaaagaagttccaa

SEQ ID NO: 8726 - DNA, 33 bp, homo sapiens
ctgctttagtgaatggyatagaccaaaagtgct

SEQ ID NO: 8727 - DNA, 33 bp, homo sapiens
actactatgtgcttccygaatgtggctaaggat

SEQ ID NO: 8728 - DNA, 33 bp, homo sapiens
gaaatgggttgttaggyaatatcatcatgtgaa

SEQ ID NO: 8729 - DNA, 33 bp, homo sapiens
ataatttgcatttatayaataccccccggcttg

SEQ ID NO: 8730 - DNA, 33 bp, homo sapiens
tcagcaaatccagcacrggtaggaaataggaaa

SEQ ID NO: 8731 - DNA, 33 bp, homo sapiens
tgttcggtaagtcccayagttggaagagaagca

SEQ ID NO: 8732 - DNA, 33 bp, homo sapiens
catttgtattgtttaaktggaactagctattga

SEQ ID NO: 8733 - DNA, 33 bp, homo sapiens
cctggagcaactattarcacagtatttcttcag

SEQ ID NO: 8734 - DNA, 33 bp, homo sapiens
gaatgcctcagaaagtmaaatctaggccatctg

SEQ ID NO: 8735 - DNA, 33 bp, homo sapiens
aactttaacaatgtgcyagcatgaggtaaggta

SEQ ID NO: 8736 - DNA, 33 bp, homo sapiens
ataattgtgaatgttayaatacagacttgaatg

SEQ ID NO: 8737 - DNA, 33 bp, homo sapiens
agggagagaagacggarcctgtcatgacacaga

SEQ ID NO: 8738 - DNA, 33 bp, homo sapiens
aattaaccaatgtccaycagaaaatagattcaa

SEQ ID NO: 8739 - DNA, 33 bp, homo sapiens
tatgaacttcagcagcyagagttggcctgatta

SEQ ID NO: 8740 - DNA, 33 bp, homo sapiens
tattttgttatagcacrgatggactaagataga

SEQ ID NO: 8741 - DNA, 33 bp, homo sapiens
ccaaaataagtgcacargtaaaataagataaaa

SEQ ID NO: 8742 - DNA, 33 bp, homo sapiens
atcttcatattttaaaygtggtgttgaaataaa

SEQ ID NO: 8743 - DNA, 33 bp, homo sapiens
tttcctgcctccatcaractttattgttctgag

SEQ ID NO: 8744 - DNA, 33 bp, homo sapiens
tcccaagctgcaatcawgaaaaaggaggaaaaa

SEQ ID NO: 8745 - DNA, 33 bp, homo sapiens
ttatagactgtgagaasgcaccttgctagcact

SEQ ID NO: 8746 - DNA, 33 bp, homo sapiens
aatgagttcaattaacracttctaatgaggacc

SEQ ID NO: 8747 - DNA, 33 bp, homo sapiens
tggtgcaggggcaaaakaatttacgaagacggt

SEQ ID NO: 8748 - DNA, 33 bp, homo sapiens
agacttagacttgctamccttttgcactgagtc

SEQ ID NO: 8749 - DNA, 33 bp, homo sapiens
ttacttggtgacctaawattcatgtgttgtaat

SEQ ID NO: 8750 - DNA, 33 bp, homo sapiens
actacatacgccctacraaaaatgctgagaaga

SEQ ID NO: 8751 - DNA, 33 bp, homo sapiens
cctgcatacagtgctcrcctgcatggggtgctc

SEQ ID NO: 8752 - DNA, 33 bp, homo sapiens
ttgtccctcctgagaaraaacagcctgggccct

SEQ ID NO: 8753 - DNA, 33 bp, homo sapiens
atgcagatttacccagyattgctcttgcatttt

SEQ ID NO: 8754 - DNA, 33 bp, homo sapiens
tcaagatggagaaggaraaattatccctggatg

SEQ ID NO: 8755 - DNA, 33 bp, homo sapiens
ccttcatagcaccaacygggattcttttaaatt

SEQ ID NO: 8756 - DNA, 33 bp, homo sapiens
gaggaaaatcactaaaragcatttgtgactatg

SEQ ID NO: 8757 - DNA, 33 bp, homo sapiens
tcttatgaaagaagccyagggagcttaaacaca

SEQ ID NO: 8758 - DNA, 33 bp, homo sapiens
ctaacagaaagcttaaytgctggggtccagtga

SEQ ID NO: 8759 - DNA, 33 bp, homo sapiens
agagcaaagggagtggraagaaatcagagagaa

SEQ ID NO: 8760 - DNA, 33 bp, homo sapiens
ggtgaccagagttacakaaggcttcagaagcat

SEQ ID NO: 8761 - DNA, 33 bp, homo sapiens
tccaagttatggggacygaccaagccgaatttc

SEQ ID NO: 8762 - DNA, 33 bp, homo sapiens
tcaacctggaatcttgraaaggccatgtggtaa

SEQ ID NO: 8763 - DNA, 33 bp, homo sapiens
tcatcctcagaaataamagaagagagcaataag

SEQ ID NO: 8764 - DNA, 33 bp, homo sapiens
agatcagatgcacagcragtgacattcatgaca

SEQ ID NO: 8765 - DNA, 33 bp, homo sapiens
ccacacactgggtgacmaaaaaacagacatttt

SEQ ID NO: 8766 - DNA, 33 bp, homo sapiens
tctagcacagagtagargcttaggatgtatcaa

SEQ ID NO: 8767 - DNA, 33 bp, homo sapiens
aaatgctgataaatacraactgaactcacttct

SEQ ID NO: 8768 - DNA, 33 bp, homo sapiens
tgtatttcacctctaayggaagaaattcttaag

SEQ ID NO: 8769 - DNA, 33 bp, homo sapiens
catacagaccatgttcyctgattataatgcgat

SEQ ID NO: 8770 - DNA, 33 bp, homo sapiens
tgcagtccttatcggckatcactggctctgcct

SEQ ID NO: 8771 - DNA, 33 bp, homo sapiens
tggaggatgctccttgkattgagttcagccata

SEQ ID NO: 8772 - DNA, 33 bp, homo sapiens
cctccaaaactctgggmaacatgagcagaatgc

SEQ ID NO: 8773 - DNA, 33 bp, homo sapiens
tcgcttcctggttgaaygatgaaaaatgattgt

SEQ ID NO: 8774 - DNA, 33 bp, homo sapiens
caactttcactctcaamattatattgactcttc

SEQ ID NO: 8775 - DNA, 33 bp, homo sapiens
ccgcacttctccctggratagcttcctgaacaa

SEQ ID NO: 8776 - DNA, 33 bp, homo sapiens
atgcaaacattataggrcaaaacatgaaagctc

SEQ ID NO: 8777 - DNA, 33 bp, homo sapiens
accatgcccttttccartaatgcctgaagctgg

SEQ ID NO: 8778 - DNA, 33 bp, homo sapiens
cttattcatctttaaaygcctagagctttaccc

SEQ ID NO: 8779 - DNA, 33 bp, homo sapiens
cttaggactgtccacaytctcttttgttgctgg

SEQ ID NO: 8780 - DNA, 33 bp, homo sapiens
tgctcataaagtggccygctactgtttgagaat

SEQ ID NO: 8781 - DNA, 33 bp, homo sapiens
gcagctgtaccttttcracaagcctaaacaaaa

SEQ ID NO: 8782 - DNA, 33 bp, homo sapiens
tcacacacatggctgarcacagtacctgctgtg

SEQ ID NO: 8783 - DNA, 33 bp, homo sapiens
tgaccagattactcaasatctgttcattttgat

SEQ ID NO: 8784 - DNA, 33 bp, homo sapiens
gagaggttaaacagagkcatggcatctgctcct

SEQ ID NO: 8785 - DNA, 33 bp, homo sapiens
tggtctgttctctcaayattactttcaattaac

SEQ ID NO: 8786 - DNA, 33 bp, homo sapiens
acagttatagagaaagmacatggggccaggagc

SEQ ID NO: 8787 - DNA, 33 bp, homo sapiens
aacaaaatgctggagckaaagttagaaggtgtc

SEQ ID NO: 8788 - DNA, 33 bp, homo sapiens
ctcccaccaggactatyaggaagattatgtcag

SEQ ID NO: 8789 - DNA, 33 bp, homo sapiens
gctggaatccagttgcrctcccaaatccagcat

SEQ ID NO: 8790 - DNA, 33 bp, homo sapiens
atacatcaattttcccrcaggacgggtctccaa

SEQ ID NO: 8791 - DNA, 33 bp, homo sapiens
gtgcattatcagacaaygctggagctgcggctg

SEQ ID NO: 8792 - DNA, 33 bp, homo sapiens
gaataaagaggttgaaragccagggatgcagga

SEQ ID NO: 8793 - DNA, 33 bp, homo sapiens
gtaaacttaattggcamatctgagcagatgaaa

SEQ ID NO: 8794 - DNA, 33 bp, homo sapiens
atcatacacacatttcyagaggtcggactctaa

SEQ ID NO: 8795 - DNA, 33 bp, homo sapiens
gtggccggaatgcagaratgaagcactgagcac

SEQ ID NO: 8796 - DNA, 33 bp, homo sapiens
cctagctctggatgacratacgtaaatagcaaa

SEQ ID NO: 8797 - DNA, 33 bp, homo sapiens
acacatatggtttgaaytgggctccaccattta

SEQ ID NO: 8798 - DNA, 33 bp, homo sapiens
aactgcaaaaatggacsgctatcaaagttggca

SEQ ID NO: 8799 - DNA, 33 bp, homo sapiens
cagaactctcccagcarcccaaattaaaaaata

SEQ ID NO: 8800 - DNA, 33 bp, homo sapiens
cttattagctttgcgaygacttatgtggttcat

SEQ ID NO: 8801 - DNA, 33 bp, homo sapiens
ttcaacactcacaaaaygggatgcttttgaaga

SEQ ID NO: 8802 - DNA, 33 bp, homo sapiens
tttacatttccacatamaaattctggcttactt

SEQ ID NO: 8803 - DNA, 33 bp, homo sapiens
ctccggcactttaagasacaaatcctgccagtt

SEQ ID NO: 8804 - DNA, 33 bp, homo sapiens
gcgggcatgaaggcackcctaatggaatattca

SEQ ID NO: 8805 - DNA, 33 bp, homo sapiens
gactggtaaatggcaaycccaagagcagggcta

SEQ ID NO: 8806 - DNA, 33 bp, homo sapiens
gtgcaatcagacacaayaatgcaaactaagcta

SEQ ID NO: 8807 - DNA, 33 bp, homo sapiens
gcaggagtagctcctayaaggcaacaacacttg

SEQ ID NO: 8808 - DNA, 33 bp, homo sapiens
gaaactttttcagtaarggttgcaatcaaagta

SEQ ID NO: 8809 - DNA, 33 bp, homo sapiens
atttttattagtaggtmaaatgactgcattggg

SEQ ID NO: 8810 - DNA, 33 bp, homo sapiens
tggtgtactcttttcakctggacagttactgaa

SEQ ID NO: 8811 - DNA, 33 bp, homo sapiens
ttgcactgaactttaayaatctccaaaatcttc

SEQ ID NO: 8812 - DNA, 33 bp, homo sapiens
gatttgctgctctatayaaaccatcgaatttct

SEQ ID NO: 8813 - DNA, 33 bp, homo sapiens
tttcaagagactacatkagcagatacagtgtca

SEQ ID NO: 8814 - DNA, 33 bp, homo sapiens
aggtgaaaataataggrcatgaactgaagagct

SEQ ID NO: 8815 - DNA, 33 bp, homo sapiens
gggtctaaaactcagakctctcattcaaatgat

SEQ ID NO: 8816 - DNA, 33 bp, homo sapiens
tataagccaagcatcargatctgataatcagca

SEQ ID NO: 8817 - DNA, 33 bp, homo sapiens
ttaagcaattggaatgratactatagaaaccat

SEQ ID NO: 8818 - DNA, 33 bp, homo sapiens
atctaactactttttcyctgaaatgctacagtg

SEQ ID NO: 8819 - DNA, 33 bp, homo sapiens
tgctgactaggtgataraacatttggcagtaga

SEQ ID NO: 8820 - DNA, 33 bp, homo sapiens
atctaattcacatggaraggatttagctggcac

SEQ ID NO: 8821 - DNA, 33 bp, homo sapiens
tgtaacgtattggtgtwaattaagaagtacttc

SEQ ID NO: 8822 - DNA, 33 bp, homo sapiens
ccccctgttcaacatartatattgagccaatca

SEQ ID NO: 8823 - DNA, 33 bp, homo sapiens
tagcacttgtttgaggkaacaatgtaaataatt

SEQ ID NO: 8824 - DNA, 33 bp, homo sapiens
ctgcgagtctggcaaartggccgaaagaaaatt

SEQ ID NO: 8825 - DNA, 33 bp, homo sapiens
cctcagaggggcagaartacatgctgattggtt

SEQ ID NO: 8826 - DNA, 33 bp, homo sapiens
acaaaggaacaggtcaraatccatggaaaaaaa

SEQ ID NO: 8827 - DNA, 33 bp, homo sapiens
gaataaaaatatagtcratcccctgtatccttg

SEQ ID NO: 8828 - DNA, 33 bp, homo sapiens
cacaaggtataaaacaractttaagatcctcaa

SEQ ID NO: 8829 - DNA, 33 bp, homo sapiens
atactatgactctatayctacaaaaccccagtt

SEQ ID NO: 8830 - DNA, 33 bp, homo sapiens
tggagaaattgaaccayactactgtcatgaccc

SEQ ID NO: 8831 - DNA, 33 bp, homo sapiens
agagacctgaagttgcyagtttcgttcagccat

SEQ ID NO: 8832 - DNA, 33 bp, homo sapiens
gcacacctagtaacagkccaactgtctgcagac

SEQ ID NO: 8833 - DNA, 33 bp, homo sapiens
cccttacctaacttcawtccaaaatatttgttg

SEQ ID NO: 8834 - DNA, 33 bp, homo sapiens
gctcaaaaacaatcacrggaaaagtttcttgtg

SEQ ID NO: 8835 - DNA, 33 bp, homo sapiens
acatatggctaaagacmactagttcccattgtt

SEQ ID NO: 8836 - DNA, 33 bp, homo sapiens
agaagacattcatttargtcactgaggaattgt

SEQ ID NO: 8837 - DNA, 33 bp, homo sapiens
ttgtgttgcttcaaaawctattttctcctctca

SEQ ID NO: 8838 - DNA, 33 bp, homo sapiens
gaagaaattatgaaggraacaatgtgagcctga

SEQ ID NO: 8839 - DNA, 33 bp, homo sapiens
atgaatagaaaacaccragggtataggaaagtt

SEQ ID NO: 8840 - DNA, 33 bp, homo sapiens
atgtctcacatggcaamatataagaaaagagag

SEQ ID NO: 8841 - DNA, 33 bp, homo sapiens
taatcataccttgaagmaataactaagcaaaca

SEQ ID NO: 8842 - DNA, 33 bp, homo sapiens
ttctcaaacgctaagayattccatagactctaa

SEQ ID NO: 8843 - DNA, 33 bp, homo sapiens
aaagtctactatcttaygattcagcaagatatt

SEQ ID NO: 8844 - DNA, 33 bp, homo sapiens
ttagttcatatagccayggaaaataacattcta

SEQ ID NO: 8845 - DNA, 33 bp, homo sapiens
actttcaacttcaaagycttgattctgttcatc

SEQ ID NO: 8846 - DNA, 33 bp, homo sapiens
tctaaaccgagcattgyacttgaaatatagtgg

SEQ ID NO: 8847 - DNA, 33 bp, homo sapiens
ttcaaggaaactggtcyattttatatttgttgg

SEQ ID NO: 8848 - DNA, 33 bp, homo sapiens
tttctggactttagggyagacaggttcaaataa

SEQ ID NO: 8849 - DNA, 33 bp, homo sapiens
taaaaataacacttgaygtatggactttttgca

SEQ ID NO: 8850 - DNA, 33 bp, homo sapiens
tttttctaggtatggartcaaatgtttagtgaa

SEQ ID NO: 8851 - DNA, 33 bp, homo sapiens
aaatacaatgtcaacaraagagaaagtttgaag

SEQ ID NO: 8852 - DNA, 33 bp, homo sapiens
atgattttaaatataargtaagtcactcagcaa

SEQ ID NO: 8853 - DNA, 33 bp, homo sapiens
acaaagtaataagatayggtgaatgaaacacac

SEQ ID NO: 8854 - DNA, 33 bp, homo sapiens
tttgtttcttccttggratctaccaccaaaata

SEQ ID NO: 8855 - DNA, 33 bp, homo sapiens
aagttagagaagaccasgctgaattgaaagagt

SEQ ID NO: 8856 - DNA, 33 bp, homo sapiens
gtaaataagttgaagawaagctggtttttaatg

SEQ ID NO: 8857 - DNA, 33 bp, homo sapiens
gaaatgtatcttgcatwataactaccagggaaa

SEQ ID NO: 8858 - DNA, 33 bp, homo sapiens
aaaattgatctagtcartgaaatcagaaaatga

SEQ ID NO: 8859 - DNA, 33 bp, homo sapiens
aaggaatttatatccaraatgtacacagaactc

SEQ ID NO: 8860 - DNA, 33 bp, homo sapiens
gaactcatggaattcartactagaaacacaaac

SEQ ID NO: 8861 - DNA, 33 bp, homo sapiens
agccaagatagagatayaacacaaatgttcatt

SEQ ID NO: 8862 - DNA, 33 bp, homo sapiens
gacaaaaatatctgctracacttatgaacacat

SEQ ID NO: 8863 - DNA, 33 bp, homo sapiens
tttgtctgagtatgtasctggcagtgggattac

SEQ ID NO: 8864 - DNA, 33 bp, homo sapiens
ttggattagagagagawattccagtgcactaat

SEQ ID NO: 8865 - DNA, 33 bp, homo sapiens
gctaaatgaatgactawaatgactcgtgattca

SEQ ID NO: 8866 - DNA, 33 bp, homo sapiens
tttgactgagacaaagraagtgaatattctcag

SEQ ID NO: 8867 - DNA, 33 bp, homo sapiens
agccttcaaagagttcraacttagattttctct

SEQ ID NO: 8868 - DNA, 33 bp, homo sapiens
cccaaatccagcctaaytactgatctctaccaa

SEQ ID NO: 8869 - DNA, 33 bp, homo sapiens
caatacaaatgaagaayctcaaccagctttgtt

SEQ ID NO: 8870 - DNA, 33 bp, homo sapiens
gcagtagagtcctaaamttgaggagacagagaa

SEQ ID NO: 8871 - DNA, 33 bp, homo sapiens
gctgcattctaaggaartgaggggtggaaataa

SEQ ID NO: 8872 - DNA, 33 bp, homo sapiens
gagcctacttgcccaayttctgagatattatcg

SEQ ID NO: 8873 - DNA, 33 bp, homo sapiens
catttctgtacaaccargcaaagcagctccagt

SEQ ID NO: 8874 - DNA, 33 bp, homo sapiens
atgtcaagtacccagamaagacctggaccaaaa

SEQ ID NO: 8875 - DNA, 33 bp, homo sapiens
aatgtctacttctgtcsagtcaaaatagcagaa

SEQ ID NO: 8876 - DNA, 33 bp, homo sapiens
agtccaatcaaaagaaygttgcattgataacac

SEQ ID NO: 8877 - DNA, 33 bp, homo sapiens
taggttttctaagggcraaacaggactaaaaat

SEQ ID NO: 8878 - DNA, 33 bp, homo sapiens
aggattaatctctgagwacctaaacattcttca

SEQ ID NO: 8879 - DNA, 33 bp, homo sapiens
tttgacaccagaggtasaggaattcctacacat

SEQ ID NO: 8880 - DNA, 33 bp, homo sapiens
agtgctagctactcacraggttgaaacaagggg

SEQ ID NO: 8881 - DNA, 33 bp, homo sapiens
ccttatgttcctcatgmcagatgacccctgtgc

SEQ ID NO: 8882 - DNA, 33 bp, homo sapiens
agatcttcaagttttaygaggacatttcagcac

SEQ ID NO: 8883 - DNA, 33 bp, homo sapiens
aaatggtagttgtgaargttcatgaattaaacc

SEQ ID NO: 8884 - DNA, 33 bp, homo sapiens
cacttcctatgaaaaaktaccctttgtgaaata

SEQ ID NO: 8885 - DNA, 33 bp, homo sapiens
gaataacaaagatacckccacctcttcaaagta

SEQ ID NO: 8886 - DNA, 33 bp, homo sapiens
taaggacaaagtcctcmagtcaggttgcagtgg

SEQ ID NO: 8887 - DNA, 33 bp, homo sapiens
actactgtgcatacttwaagccaggtattatct

SEQ ID NO: 8888 - DNA, 33 bp, homo sapiens
ggtgagtagagggtgcracggcttctagaaaga

SEQ ID NO: 8889 - DNA, 33 bp, homo sapiens
tgttacttcaccataayatagcaaagaagaagc

SEQ ID NO: 8890 - DNA, 33 bp, homo sapiens
attgttgatgtttttayattcattgccttctag

SEQ ID NO: 8891 - DNA, 33 bp, homo sapiens
tcatgaactatacttawgatgttactgcagata

SEQ ID NO: 8892 - DNA, 33 bp, homo sapiens
gctgtaggtcagaagawgaaggaaaatgtaaaa

SEQ ID NO: 8893 - DNA, 33 bp, homo sapiens
atattgtgacggattcmacctgggtcacccttg

SEQ ID NO: 8894 - DNA, 33 bp, homo sapiens
atatgattaagggggaragtctacagctcactc

SEQ ID NO: 8895 - DNA, 33 bp, homo sapiens
tcagctccccgtaccartgagcaacttggccac

SEQ ID NO: 8896 - DNA, 33 bp, homo sapiens
tgtttgagatccccacrgaatttgaaacagaat

SEQ ID NO: 8897 - DNA, 33 bp, homo sapiens
tgtaaaattagagaaaktgggataagcgctttg

SEQ ID NO: 8898 - DNA, 33 bp, homo sapiens
ggatttatttattaaamtgtgcagcaggactag

SEQ ID NO: 8899 - DNA, 33 bp, homo sapiens
gcaattatgagatcaasggcctttgttgcagat

SEQ ID NO: 8900 - DNA, 33 bp, homo sapiens
actgaaaaataatctaracagtctctttcattc

SEQ ID NO: 8901 - DNA, 33 bp, homo sapiens
gggctgccagactatayacaaggcatatccatt

SEQ ID NO: 8902 - DNA, 33 bp, homo sapiens
aggggtgagcgtgactmaagtacatttttacac

SEQ ID NO: 8903 - DNA, 33 bp, homo sapiens
ccacaagataattacargtatccagcaaaaacg

SEQ ID NO: 8904 - DNA, 33 bp, homo sapiens
gaaaaaattccttgtcmcattacccatgacaat

SEQ ID NO: 8905 - DNA, 33 bp, homo sapiens
tgggcatttcaatggcraaaactgtaccattga

SEQ ID NO: 8906 - DNA, 33 bp, homo sapiens
ggctttcctggcctcgyaatctagagtgtaagc

SEQ ID NO: 8907 - DNA, 33 bp, homo sapiens
gtcatgatagtgtcccrgaaaatgtcacaggat

SEQ ID NO: 8908 - DNA, 33 bp, homo sapiens
gtagtaagagttcaccrataaccacgacaacaa

SEQ ID NO: 8909 - DNA, 33 bp, homo sapiens
ttttttgagggtgacaratacagagaatgtgca

SEQ ID NO: 8910 - DNA, 33 bp, homo sapiens
tttagaattgcaatagwccacaaatacaagtat

SEQ ID NO: 8911 - DNA, 33 bp, homo sapiens
tttcaaagcatatctayctaggtttacatagta

SEQ ID NO: 8912 - DNA, 33 bp, homo sapiens
tttcagagagttgtagyatctttttgccgataa

SEQ ID NO: 8913 - DNA, 33 bp, homo sapiens
gacagcacagtagggayaagacaaataaaacgg

SEQ ID NO: 8914 - DNA, 33 bp, homo sapiens
actgattatgattaagsaatatgttgtcagtac

SEQ ID NO: 8915 - DNA, 33 bp, homo sapiens
tatttttacagtcccartgagatcaactaaaat

SEQ ID NO: 8916 - DNA, 33 bp, homo sapiens
acctgcctataatggakgtgagattaggctaac

SEQ ID NO: 8917 - DNA, 33 bp, homo sapiens
tccttgattagatttcratattccaatcgctag

SEQ ID NO: 8918 - DNA, 33 bp, homo sapiens
attaaaagataaaacckgagacatcttgttttc

SEQ ID NO: 8919 - DNA, 33 bp, homo sapiens
agaagagtttttccagwcaggaggaagagctgg

SEQ ID NO: 8920 - DNA, 33 bp, homo sapiens
ttgaagcagtcattagraagtatgtacagatga

SEQ ID NO: 8921 - DNA, 33 bp, homo sapiens
taatggttaagtaaaaraccctattctcaagcc

SEQ ID NO: 8922 - DNA, 33 bp, homo sapiens
actataaattaaagtamactgcaagtagagaaa

SEQ ID NO: 8923 - DNA, 33 bp, homo sapiens
ttgctcaccctccagaygtccatgtacctcagc

SEQ ID NO: 8924 - DNA, 33 bp, homo sapiens
ttatctttatcatcatsagcctcagtatcatca

SEQ ID NO: 8925 - DNA, 33 bp, homo sapiens
agtgaagagcacttaastaaaaggtgctaactc

SEQ ID NO: 8926 - DNA, 33 bp, homo sapiens
tgaaatgattaaaaccraacatttctcagccaa

SEQ ID NO: 8927 - DNA, 33 bp, homo sapiens
tttttcttctaagcaamgttatgtcaaaagacc

SEQ ID NO: 8928 - DNA, 33 bp, homo sapiens
ttcttctttgttcatakctgtcttctggcatct

SEQ ID NO: 8929 - DNA, 33 bp, homo sapiens
ctaggagctcagagtcyacttggtgaaataaaa

SEQ ID NO: 8930 - DNA, 33 bp, homo sapiens
agaagcagcctcaaaaygaagatctttctgaac

SEQ ID NO: 8931 - DNA, 33 bp, homo sapiens
gagcctgttgttcctgyagagctgcaaaagcag

SEQ ID NO: 8932 - DNA, 33 bp, homo sapiens
gaatcacaaagcccacratttgtcttattcctt

SEQ ID NO: 8933 - DNA, 33 bp, homo sapiens
gaaacccctgtgggaaragcagctccacacaca

SEQ ID NO: 8934 - DNA, 33 bp, homo sapiens
ctgaaaggaaactgagyccaagatatgctaatt

SEQ ID NO: 8935 - DNA, 33 bp, homo sapiens
aacattatgagaatcawtaacctgtacccttat

SEQ ID NO: 8936 - DNA, 33 bp, homo sapiens
gaccaatatactttcayccctgcaaggacctct

SEQ ID NO: 8937 - DNA, 33 bp, homo sapiens
tttaaaatcttcctatyaacttgggtcattgta

SEQ ID NO: 8938 - DNA, 33 bp, homo sapiens
aagatcagatggtcgcmgatgtgtggccttatt

SEQ ID NO: 8939 - DNA, 33 bp, homo sapiens
catttttccagctcacrccctctcattctttga

SEQ ID NO: 8940 - DNA, 33 bp, homo sapiens
ttcttatcaaataggcraaggggaataattgca

SEQ ID NO: 8941 - DNA, 33 bp, homo sapiens
tcaacctgtatctatcracacataaataaatgg

SEQ ID NO: 8942 - DNA, 33 bp, homo sapiens
ttgtgttaaagaatcaraagtttagcgtaacag

SEQ ID NO: 8943 - DNA, 33 bp, homo sapiens
ttttcctgtaagatcargaataaggatgcctgc

SEQ ID NO: 8944 - DNA, 33 bp, homo sapiens
tacagtccagctgcgcracagaacaagaatctg

SEQ ID NO: 8945 - DNA, 33 bp, homo sapiens
aagataaatccacaccygacacacccatgaaaa

SEQ ID NO: 8946 - DNA, 33 bp, homo sapiens
cttcccagcctaacaaycgtaaagtgtttccat

SEQ ID NO: 8947 - DNA, 33 bp, homo sapiens
actaaagccctcaggawctcagtgtattggtgg

SEQ ID NO: 8948 - DNA, 33 bp, homo sapiens
cagaatcctgggttaayaaattctgcaaacatt

SEQ ID NO: 8949 - DNA, 33 bp, homo sapiens
caatagcatatctttawcatctgtgaaaaatca

SEQ ID NO: 8950 - DNA, 33 bp, homo sapiens
ttactcttctctatttwaaaaaatcacgtatta

SEQ ID NO: 8951 - DNA, 33 bp, homo sapiens
atctgacaaatgaggaratagaagccaaggaca

SEQ ID NO: 8952 - DNA, 33 bp, homo sapiens
ggaaaaatacgaatacraatactgaggccctcc

SEQ ID NO: 8953 - DNA, 33 bp, homo sapiens
ccctgagtctctggatsaaacccgcatttccgt

SEQ ID NO: 8954 - DNA, 33 bp, homo sapiens
attgtagcattttgcargtagtgtagtgattgt

SEQ ID NO: 8955 - DNA, 33 bp, homo sapiens
gattttctcagtaggawcgcagaactaggagag

SEQ ID NO: 8956 - DNA, 33 bp, homo sapiens
gccatccgttgtgactwaaagcatctgggtcag

SEQ ID NO: 8957 - DNA, 33 bp, homo sapiens
gcacttggaaaaggaargtcatggctgcattat

SEQ ID NO: 8958 - DNA, 33 bp, homo sapiens
tctgaaattgcagaccrcagagactggtcatga

SEQ ID NO: 8959 - DNA, 33 bp, homo sapiens
aaatctgcctttttaartgtatagttccacagg

SEQ ID NO: 8960 - DNA, 33 bp, homo sapiens
ccattcaagttaataarcgcagggctgggcatg

SEQ ID NO: 8961 - DNA, 33 bp, homo sapiens
cagcagacgagaccatkaggagttctgtccatg

SEQ ID NO: 8962 - DNA, 33 bp, homo sapiens
gggttggatgtgaacaracaacctctgcggttc

SEQ ID NO: 8963 - DNA, 33 bp, homo sapiens
cttacagtgatgctgarattcaccttttaagaa

SEQ ID NO: 8964 - DNA, 33 bp, homo sapiens
tggaagccagagccaartcttcagtgatcagag

SEQ ID NO: 8965 - DNA, 33 bp, homo sapiens
ttccactaagctcccasgcgatgccagtgctgc

SEQ ID NO: 8966 - DNA, 33 bp, homo sapiens
attgctgatattcaacscatagtcccctgtccc

SEQ ID NO: 8967 - DNA, 33 bp, homo sapiens
agccagtcagtgaacartgtggaaaggaagata

SEQ ID NO: 8968 - DNA, 33 bp, homo sapiens
ctggaattcccagttaygtatgatgattgccag

SEQ ID NO: 8969 - DNA, 33 bp, homo sapiens
tcctctttagacacccrgaatcacagctctctt

SEQ ID NO: 8970 - DNA, 33 bp, homo sapiens
ggcctgaagaatccccragcagataaaaccagt

SEQ ID NO: 8971 - DNA, 33 bp, homo sapiens
gttacatacaggacatwacaaggttaaggagtg

SEQ ID NO: 8972 - DNA, 33 bp, homo sapiens
aggactttcaccttacmcattggtggagagaga

SEQ ID NO: 8973 - DNA, 33 bp, homo sapiens
ttccagagacagtccarctgtgcattttatttt

SEQ ID NO: 8974 - DNA, 33 bp, homo sapiens
tgctagggcagtcttarcaatttcagagactag

SEQ ID NO: 8975 - DNA, 33 bp, homo sapiens
acacagggtttaacacraaaattctgcatgaga

SEQ ID NO: 8976 - DNA, 33 bp, homo sapiens
tatttatagtttttaaygaagtattccaggata

SEQ ID NO: 8977 - DNA, 33 bp, homo sapiens
ggtttggggcaagtaayggagacttcaaaaata

SEQ ID NO: 8978 - DNA, 33 bp, homo sapiens
ttacttaggggaaccartctctggtaactgata

SEQ ID NO: 8979 - DNA, 33 bp, homo sapiens
ccaaatgcagtgaaaaygaggttaagcctatga

SEQ ID NO: 8980 - DNA, 33 bp, homo sapiens
tgattccatatagtgcrcttgctcgttatattc

SEQ ID NO: 8981 - DNA, 33 bp, homo sapiens
gtcaggatggattgttyaaagtgatgcctcttg

SEQ ID NO: 8982 - DNA, 33 bp, homo sapiens
gcagtggttagcctccraacttcagttcctaca

SEQ ID NO: 8983 - DNA, 33 bp, homo sapiens
aggatctggtttagcckaagtttacatctcatc

SEQ ID NO: 8984 - DNA, 33 bp, homo sapiens
cactgagaggagttaascattcagaggcattgg

SEQ ID NO: 8985 - DNA, 33 bp, homo sapiens
acttgcaggtaataacrgtgtcaggttaacagc

SEQ ID NO: 8986 - DNA, 33 bp, homo sapiens
agtcatgaaaggtaagraaagacgagtcacaaa

SEQ ID NO: 8987 - DNA, 33 bp, homo sapiens
catggccaagaggagartcacagaaagatgatg

SEQ ID NO: 8988 - DNA, 33 bp, homo sapiens
tacttgagaccccaccragatcaccagttctca

SEQ ID NO: 8989 - DNA, 33 bp, homo sapiens
taagcgactgtttgatmagattagtagggacag

SEQ ID NO: 8990 - DNA, 33 bp, homo sapiens
aaagggctgtctcttamaatctagataaggttg

SEQ ID NO: 8991 - DNA, 33 bp, homo sapiens
atgcaataattttggcwaatggatcaaacagtt

SEQ ID NO: 8992 - DNA, 33 bp, homo sapiens
tgtgacctgggtatgawgccattgccacagagc

SEQ ID NO: 8993 - DNA, 33 bp, homo sapiens
tgtagagtattagaccrggcaaagtgaaaaggg

SEQ ID NO: 8994 - DNA, 33 bp, homo sapiens
ttttgagaattgctagyaccgtttctaccactc

SEQ ID NO: 8995 - DNA, 33 bp, homo sapiens
ttgaaacaacatttacwgctttatggtattcat

SEQ ID NO: 8996 - DNA, 33 bp, homo sapiens
gctgcccaggagttccyctatttggactgccgg

SEQ ID NO: 8997 - DNA, 33 bp, homo sapiens
ggttcaggacataagcragttcttagggccagc

SEQ ID NO: 8998 - DNA, 33 bp, homo sapiens
ggagcttataatctgawgggaaaagcacaatat

SEQ ID NO: 8999 - DNA, 33 bp, homo sapiens
gtccaccttctgatcartatggtccacccttga

SEQ ID NO: 9000 - DNA, 33 bp, homo sapiens
gctggaactgctgaacraacctctcccaggtag

SEQ ID NO: 9001 - DNA, 33 bp, homo sapiens
tgctcacctcagggcayaatcataagaaaggag

SEQ ID NO: 9002 - DNA, 33 bp, homo sapiens
cccacgtcaacatcagratccttactgtgggca

SEQ ID NO: 9003 - DNA, 33 bp, homo sapiens
tgtttttcttaaggccrctgtatccagaactct

SEQ ID NO: 9004 - DNA, 33 bp, homo sapiens
tccaggaatgactgaasatagcttggaggttag

SEQ ID NO: 9005 - DNA, 33 bp, homo sapiens
tgacagaaggacaaaaytgtgttagtgaaaaca

SEQ ID NO: 9006 - DNA, 33 bp, homo sapiens
cttcaaggaaaacaackgatagaattcatgcca

SEQ ID NO: 9007 - DNA, 33 bp, homo sapiens
tcttgtcgcagcttcaragccctccaggtgtgc

SEQ ID NO: 9008 - DNA, 33 bp, homo sapiens
atttgtatattttcacwgggaacactggagtgt

SEQ ID NO: 9009 - DNA, 33 bp, homo sapiens
gtgcactcactgaaaaratgcggaaaagattga

SEQ ID NO: 9010 - DNA, 33 bp, homo sapiens
gaagcataggtactcayccagagtcagcatttt

SEQ ID NO: 9011 - DNA, 33 bp, homo sapiens
accatgaaatgcattamagtgtattcctatatc

SEQ ID NO: 9012 - DNA, 33 bp, homo sapiens
cttcccagtgctcttayagcaagttattgacaa

SEQ ID NO: 9013 - DNA, 33 bp, homo sapiens
cttccatggctatgaastcacccaccatctttg

SEQ ID NO: 9014 - DNA, 33 bp, homo sapiens
tctttattgccactctsacttatgagcccgagt

SEQ ID NO: 9015 - DNA, 33 bp, homo sapiens
agcagttttctgaaaargcattaatatgtcatt

SEQ ID NO: 9016 - DNA, 33 bp, homo sapiens
agcaactatttctgagrattttccttgccccag

SEQ ID NO: 9017 - DNA, 33 bp, homo sapiens
gatccttttgtgactaygttttcatttctttta

SEQ ID NO: 9018 - DNA, 33 bp, homo sapiens
gccatttgtcctagaasctcctaagctagttga

SEQ ID NO: 9019 - DNA, 33 bp, homo sapiens
atcagtaagatatcaamtccttctttagacttc

SEQ ID NO: 9020 - DNA, 33 bp, homo sapiens
cagtaaaaagtcttccyatggcttctcttatct

SEQ ID NO: 9021 - DNA, 33 bp, homo sapiens
agaaaaagaaagccaawtatacccagtccttta

SEQ ID NO: 9022 - DNA, 33 bp, homo sapiens
tctctgtgtgagctcargcaaatatctctgcct

SEQ ID NO: 9023 - DNA, 33 bp, homo sapiens
attgtagtactagaacyaagccttcacatctca

SEQ ID NO: 9024 - DNA, 33 bp, homo sapiens
tgtttatggtctgagaygcatacctactaccca

SEQ ID NO: 9025 - DNA, 33 bp, homo sapiens
ttaatgtgatgtctgarattgcttcaaaataac

SEQ ID NO: 9026 - DNA, 33 bp, homo sapiens
ggccagcctaccagaamtgccggcagcctgact

SEQ ID NO: 9027 - DNA, 33 bp, homo sapiens
gttacaattccacacastaatactcaaattttg

SEQ ID NO: 9028 - DNA, 33 bp, homo sapiens
tggtgttgggtgctaaragaatgtcctcctcca

SEQ ID NO: 9029 - DNA, 33 bp, homo sapiens
ttggagatttcagtaasatccttaggttcacac

SEQ ID NO: 9030 - DNA, 33 bp, homo sapiens
ttttgccctctctctgkcacacgcagcagtcta

SEQ ID NO: 9031 - DNA, 33 bp, homo sapiens
agcaagagcttgggacrcttgagttactgcaca

SEQ ID NO: 9032 - DNA, 33 bp, homo sapiens
ttggcagtggtattaayatggtttttcgatact

SEQ ID NO: 9033 - DNA, 33 bp, homo sapiens
ggttgacactagttccwctttcaacccattagt

SEQ ID NO: 9034 - DNA, 33 bp, homo sapiens
aatctgagcgaataacmacctctcctctctctc

SEQ ID NO: 9035 - DNA, 33 bp, homo sapiens
gagcaatgaatggtgaygtaaaagatcagttaa

SEQ ID NO: 9036 - DNA, 33 bp, homo sapiens
acacagcctaataaccwgaaccaattgagaaaa

SEQ ID NO: 9037 - DNA, 33 bp, homo sapiens
tatacaggaatacaacyatatgccgagtcttat

SEQ ID NO: 9038 - DNA, 33 bp, homo sapiens
atcatagttttatgtamcctgttctaaattgaa

SEQ ID NO: 9039 - DNA, 33 bp, homo sapiens
tttaaccattccttacygcaagaaatcaacgca

SEQ ID NO: 9040 - DNA, 33 bp, homo sapiens
agaacagtggcagaacrccagagtggttaagac

SEQ ID NO: 9041 - DNA, 33 bp, homo sapiens
aacaaatctactctacraaaagtatgggcatgg

SEQ ID NO: 9042 - DNA, 33 bp, homo sapiens
tcacagaaattctctamgcctcactgtcctcat

SEQ ID NO: 9043 - DNA, 33 bp, homo sapiens
acatctcagcatttcaytctggtgcataagtct

SEQ ID NO: 9044 - DNA, 33 bp, homo sapiens
gttagcctcttaatackgtataatgccttggca

SEQ ID NO: 9045 - DNA, 33 bp, homo sapiens
tcaaaatgactgatgayaagtagagacgagcag

SEQ ID NO: 9046 - DNA, 33 bp, homo sapiens
tagtattactgataccygctgggacttttctct

SEQ ID NO: 9047 - DNA, 33 bp, homo sapiens
gagggatccaagtaackggctgcccaggctagc

SEQ ID NO: 9048 - DNA, 33 bp, homo sapiens
cacagtaggaaggaaayttgtttatacagcatc

SEQ ID NO: 9049 - DNA, 33 bp, homo sapiens
tgacagaagagcttcamcgtatttttctttcca

SEQ ID NO: 9050 - DNA, 33 bp, homo sapiens
tacccctaagggtataygtgttggagtcctcgg

SEQ ID NO: 9051 - DNA, 33 bp, homo sapiens
tgactgccatttcatasataagaaattagaggc

SEQ ID NO: 9052 - DNA, 33 bp, homo sapiens
agctatacattttttaygctctgagaaagatat

SEQ ID NO: 9053 - DNA, 33 bp, homo sapiens
attgagaaaacgtccayattaagtgggtgggaa

SEQ ID NO: 9054 - DNA, 33 bp, homo sapiens
atttaagcatggattasaaggatgcacagtaac

SEQ ID NO: 9055 - DNA, 33 bp, homo sapiens
aatggaatggaaatacsagtcaagagagaaaag

SEQ ID NO: 9056 - DNA, 33 bp, homo sapiens
ctgaggtcctcttcctraaagttctttatcatc

SEQ ID NO: 9057 - DNA, 33 bp, homo sapiens
accacccagctcaaagrcagcaactatcaactg

SEQ ID NO: 9058 - DNA, 33 bp, homo sapiens
ttggttcattgagttamgtaaatcttccacagg

SEQ ID NO: 9059 - DNA, 33 bp, homo sapiens
atctactctgttagatsatacaaattcaggagg

SEQ ID NO: 9060 - DNA, 33 bp, homo sapiens
gttattgtttagaaagkattctatcagtgtttt

SEQ ID NO: 9061 - DNA, 33 bp, homo sapiens
tattaatcagcttttgyagttagtacatgatag

SEQ ID NO: 9062 - DNA, 33 bp, homo sapiens
tgtgcctctctcctgayaagaacgttctgttca

SEQ ID NO: 9063 - DNA, 33 bp, homo sapiens
gtgtgggcgcaggtgarggaaagacttctcaca

SEQ ID NO: 9064 - DNA, 33 bp, homo sapiens
gggagcaagtggaatcycatctgaaactgacaa

SEQ ID NO: 9065 - DNA, 33 bp, homo sapiens
aatatcaggcttggaayaggaaacaagaatgtg

SEQ ID NO: 9066 - DNA, 33 bp, homo sapiens
aggcttactaggcatgscaaagatagaaataaa

SEQ ID NO: 9067 - DNA, 33 bp, homo sapiens
tgtgtcaattaagaatwactccagctgcagtaa

SEQ ID NO: 9068 - DNA, 33 bp, homo sapiens
agaaacaatgaatgacsagaacaaacatatgcc

SEQ ID NO: 9069 - DNA, 33 bp, homo sapiens
ctcatactcctcagaayattgtcccatggggtc

SEQ ID NO: 9070 - DNA, 33 bp, homo sapiens
catacaaaaatttcaarcatcactgctgtagat

SEQ ID NO: 9071 - DNA, 33 bp, homo sapiens
tgcaaagccaaagcagraaagatgtttaaggtt

SEQ ID NO: 9072 - DNA, 33 bp, homo sapiens
agagtttttgatgtacraggagttttgagatgc

SEQ ID NO: 9073 - DNA, 33 bp, homo sapiens
cttctaagaatttccawccaacatagggaagga

SEQ ID NO: 9074 - DNA, 33 bp, homo sapiens
gttctaagcataagcaytgcattatcttttgtt

SEQ ID NO: 9075 - DNA, 33 bp, homo sapiens
cccgttggctgcatacmgactaccttgtaaggt

SEQ ID NO: 9076 - DNA, 33 bp, homo sapiens
gcacaagagaggtgggwaggagctgtatagggc

SEQ ID NO: 9077 - DNA, 33 bp, homo sapiens
aatagctagtacctaaytgagcattcatgatgt

SEQ ID NO: 9078 - DNA, 33 bp, homo sapiens
ggagccacagcccttaygaggggcaagtctagt

SEQ ID NO: 9079 - DNA, 33 bp, homo sapiens
tggaaccatgagttggrcatgctgtttgtgtag

SEQ ID NO: 9080 - DNA, 33 bp, homo sapiens
gaaaatgttatcaggaragcaggattaaataag

SEQ ID NO: 9081 - DNA, 33 bp, homo sapiens
ccctgccctaatcaccragcagacaggcaacat

SEQ ID NO: 9082 - DNA, 33 bp, homo sapiens
taaagaaaaacatggargacttagcattcagag

SEQ ID NO: 9083 - DNA, 33 bp, homo sapiens
gcagagatagcagaaakcaagaaaaaggttgga

SEQ ID NO: 9084 - DNA, 33 bp, homo sapiens
acgtcctatttacataraagtcctcaaaggtgt

SEQ ID NO: 9085 - DNA, 33 bp, homo sapiens
cagaagagataatcacraactctactctcactg

SEQ ID NO: 9086 - DNA, 33 bp, homo sapiens
agaaaaaagtctgttayacatatgactcactta

SEQ ID NO: 9087 - DNA, 33 bp, homo sapiens
agtttggaactaaatgraggagaacctacgttt

SEQ ID NO: 9088 - DNA, 33 bp, homo sapiens
agctaaatggagtccaraagaagtaagtcctta

SEQ ID NO: 9089 - DNA, 33 bp, homo sapiens
gatcacttgcctgtgaytaggactgctcactat

SEQ ID NO: 9090 - DNA, 33 bp, homo sapiens
cacatctgaagtcccaraacgttgtgaggctaa

SEQ ID NO: 9091 - DNA, 33 bp, homo sapiens
tgtgggtaattataacragacacttgattgtga

SEQ ID NO: 9092 - DNA, 33 bp, homo sapiens
tccaggcatttacagartatgtgcccattgctc

SEQ ID NO: 9093 - DNA, 33 bp, homo sapiens
ttaaaagaagactgcargagatggtggtacttt

SEQ ID NO: 9094 - DNA, 33 bp, homo sapiens
gggctgctgcccatacwatgtttcctgacattc

SEQ ID NO: 9095 - DNA, 33 bp, homo sapiens
ctacaaattatctcccratactggcaatgaaaa

SEQ ID NO: 9096 - DNA, 33 bp, homo sapiens
aatgtgtaagaactacwgcttaccaacactgct

SEQ ID NO: 9097 - DNA, 33 bp, homo sapiens
tattcatccattttcartacattttcagatttc

SEQ ID NO: 9098 - DNA, 33 bp, homo sapiens
ccacatgaataactacyagggtgcgataggctg

SEQ ID NO: 9099 - DNA, 33 bp, homo sapiens
gattttaatgcaatcarcaaaactaggcatgta

SEQ ID NO: 9100 - DNA, 33 bp, homo sapiens
cggttttggatcaaaasagggtgcagtctgagc

SEQ ID NO: 9101 - DNA, 33 bp, homo sapiens
atttccaggattatgckcacatgcacatataat

SEQ ID NO: 9102 - DNA, 33 bp, homo sapiens
gctgagggcacaggtgyaaagcaaggggcactt

SEQ ID NO: 9103 - DNA, 33 bp, homo sapiens
gagtcaattggggtgamgttaggtgggaactga

SEQ ID NO: 9104 - DNA, 33 bp, homo sapiens
tcattctgtgcctgcaytctaaaacagtaacaa

SEQ ID NO: 9105 - DNA, 33 bp, homo sapiens
taaaaagcagttctacyaaaggcaagcactact

SEQ ID NO: 9106 - DNA, 33 bp, homo sapiens
tttactacatgcacacwacccattttgttgact

SEQ ID NO: 9107 - DNA, 33 bp, homo sapiens
tgtgactaaggagtgayggagggggcatttcag

SEQ ID NO: 9108 - DNA, 33 bp, homo sapiens
gcaccctgtcagcgaamagaaccccaatgctgc

SEQ ID NO: 9109 - DNA, 33 bp, homo sapiens
agttagtacagatatcrcaaggtaaagtttctg

SEQ ID NO: 9110 - DNA, 33 bp, homo sapiens
taaaagtgtaaacatcygagccctcaaaaccca

SEQ ID NO: 9111 - DNA, 33 bp, homo sapiens
tggtgatgacttagacrcgtaacccagttatca

SEQ ID NO: 9112 - DNA, 33 bp, homo sapiens
tcttgaggaggctttarctgactaccccatcta

SEQ ID NO: 9113 - DNA, 33 bp, homo sapiens
caggtgaaggccaaagrcttccagtcaagggca

SEQ ID NO: 9114 - DNA, 33 bp, homo sapiens
cattttcctaattctcygactagtgtcaaccct

SEQ ID NO: 9115 - DNA, 33 bp, homo sapiens
ttagaccacagattccragcaggctcattggct

SEQ ID NO: 9116 - DNA, 33 bp, homo sapiens
cacttgccagggacaayctgcagaggtatcttt

SEQ ID NO: 9117 - DNA, 33 bp, homo sapiens
tcatcagctaagaagarcttaacagtttgcaga

SEQ ID NO: 9118 - DNA, 33 bp, homo sapiens
catgaagcagggagtaraacctaatgaacttat

SEQ ID NO: 9119 - DNA, 33 bp, homo sapiens
gttagaggaacatcccraatacattaaaacact

SEQ ID NO: 9120 - DNA, 33 bp, homo sapiens
catggggaggcacagasaggaatgatgctgact

SEQ ID NO: 9121 - DNA, 33 bp, homo sapiens
aacagcaagatgaggaygagagactttggtggg

SEQ ID NO: 9122 - DNA, 33 bp, homo sapiens
ataagcctttgcaccamgtttttccaagtctct

SEQ ID NO: 9123 - DNA, 33 bp, homo sapiens
cttatttaaaaaataastgagcaacctatgggt

SEQ ID NO: 9124 - DNA, 33 bp, homo sapiens
ccatgccaaagctaaargagctgtcacttaaga

SEQ ID NO: 9125 - DNA, 33 bp, homo sapiens
atattcactgggattamccaatcaattcccaat

SEQ ID NO: 9126 - DNA, 33 bp, homo sapiens
agtacaattctctagamatgctacacaatttac

SEQ ID NO: 9127 - DNA, 33 bp, homo sapiens
caccctatctgtgaacmaactgctcatgtcata

SEQ ID NO: 9128 - DNA, 33 bp, homo sapiens
cctgggcagaggatagkatgaaagtcagcacta

SEQ ID NO: 9129 - DNA, 33 bp, homo sapiens
tcagcactccagaaaaygatgggtactacaact

SEQ ID NO: 9130 - DNA, 33 bp, homo sapiens
tgagtgttttaacaacrgcattaacaaactcag

SEQ ID NO: 9131 - DNA, 33 bp, homo sapiens
tgttagtttccacataygttttccctgtgttgt

SEQ ID NO: 9132 - DNA, 33 bp, homo sapiens
atatccagagaatcaayccactgcagatcaaaa

SEQ ID NO: 9133 - DNA, 33 bp, homo sapiens
aaaaacctaccaatgcmacaaatggtgctaagc

SEQ ID NO: 9134 - DNA, 33 bp, homo sapiens
cttattttggttttcarattcacttccctgttt

SEQ ID NO: 9135 - DNA, 33 bp, homo sapiens
aatttgtttaaggaaawtgccagtgtatcagcc

SEQ ID NO: 9136 - DNA, 33 bp, homo sapiens
ctcagattaatgtatcycagccctctgaaagcc

SEQ ID NO: 9137 - DNA, 33 bp, homo sapiens
ttaccctgcccttctaygttcttcagtcttaat

SEQ ID NO: 9138 - DNA, 33 bp, homo sapiens
gagagggacctgcaaawgaaaatgtatgctttc

SEQ ID NO: 9139 - DNA, 33 bp, homo sapiens
tcatagattctgcaagsaaagtttggtggctga

SEQ ID NO: 9140 - DNA, 33 bp, homo sapiens
aagcttaggaagctgasagattgtgatttgtct

SEQ ID NO: 9141 - DNA, 33 bp, homo sapiens
ggtttctacgtaggcaytcttattcccagtatg

SEQ ID NO: 9142 - DNA, 33 bp, homo sapiens
caagcaattttgggaayaagtgtgcactttttt

SEQ ID NO: 9143 - DNA, 33 bp, homo sapiens
gccaaagtagccatcaraaatcaagagacttag

SEQ ID NO: 9144 - DNA, 33 bp, homo sapiens
gtttgcttaataaaagyatggaagacaagcaag

SEQ ID NO: 9145 - DNA, 33 bp, homo sapiens
gtgataaactaaggcayggttctgaggtgaaga

SEQ ID NO: 9146 - DNA, 33 bp, homo sapiens
tacagcatggctgccamgaaaattgaaaaaaat

SEQ ID NO: 9147 - DNA, 33 bp, homo sapiens
cagaaactgaacacaartgattgaaaggtcaat

SEQ ID NO: 9148 - DNA, 33 bp, homo sapiens
ttgacagttccctttargttgtgtgttgttagc

SEQ ID NO: 9149 - DNA, 33 bp, homo sapiens
ttaaaatggaacttcawcctattggtgtaaaat

SEQ ID NO: 9150 - DNA, 33 bp, homo sapiens
gctagaaaaatagcaayagtagtgtttatttaa

SEQ ID NO: 9151 - DNA, 33 bp, homo sapiens
aaaatctaaaggggcargtagacaaaagttgaa

SEQ ID NO: 9152 - DNA, 33 bp, homo sapiens
tatattgcaacagtgayggttttcaggtttgta

SEQ ID NO: 9153 - DNA, 33 bp, homo sapiens
ttctcccattctggaakgttgtctgtttacact

SEQ ID NO: 9154 - DNA, 33 bp, homo sapiens
ctgtagatagtttgagrattatgaaatgtgact

SEQ ID NO: 9155 - DNA, 33 bp, homo sapiens
ctcagagtccaagctcwcttgtcttgaagcaat

SEQ ID NO: 9156 - DNA, 33 bp, homo sapiens
ttggtaaatcactgacyaaaggattgtaattga

SEQ ID NO: 9157 - DNA, 33 bp, homo sapiens
ccagcaaaatagattawctgtttctcagtggtt

SEQ ID NO: 9158 - DNA, 33 bp, homo sapiens
gttcacgaatcaataaktagaaccacttggaat

SEQ ID NO: 9159 - DNA, 33 bp, homo sapiens
tggaattcagataggawcattctaaaggcagtg

SEQ ID NO: 9160 - DNA, 33 bp, homo sapiens
ggggatgagcattcaaratacactgagtgacaa

SEQ ID NO: 9161 - DNA, 33 bp, homo sapiens
cccaggagacgggtcaytattttgaggaggtat

SEQ ID NO: 9162 - DNA, 33 bp, homo sapiens
ctttcagggtccagagmcagcacattgacttta

SEQ ID NO: 9163 - DNA, 33 bp, homo sapiens
aaagttgatcctcaaamgtatacaaaattacaa

SEQ ID NO: 9164 - DNA, 33 bp, homo sapiens
tgttggtgggaatgtcrattaattcagccattg

SEQ ID NO: 9165 - DNA, 33 bp, homo sapiens
tatgattagaggttagmaaatcaacatgatttc

SEQ ID NO: 9166 - DNA, 33 bp, homo sapiens
atcccaagtgaattaaygcagtatcagaaaacc

SEQ ID NO: 9167 - DNA, 33 bp, homo sapiens
gtttcacgttctggagscacacataataaattt

SEQ ID NO: 9168 - DNA, 33 bp, homo sapiens
tctgggccttgtcacasctttccctctggactg

SEQ ID NO: 9169 - DNA, 33 bp, homo sapiens
aagccttcgagggatawctacaagttcttctaa

SEQ ID NO: 9170 - DNA, 33 bp, homo sapiens
ccaaaaagacacaagcrcaaatatgttcattgc

SEQ ID NO: 9171 - DNA, 33 bp, homo sapiens
agtaaaagtttcaacawcatccgctagggcttg

SEQ ID NO: 9172 - DNA, 33 bp, homo sapiens
tatcaacgtgtgcatcraggcaactcatttcct

SEQ ID NO: 9173 - DNA, 33 bp, homo sapiens
tcttttgctttgttcamgtctacttttatgcct

SEQ ID NO: 9174 - DNA, 33 bp, homo sapiens
tatgtctgcttcttaartcatgtgtttcaatac

SEQ ID NO: 9175 - DNA, 33 bp, homo sapiens
acagggaacccaggcakcgatctttcaagagat

SEQ ID NO: 9176 - DNA, 33 bp, homo sapiens
tactatagggattcgakgatgagtatagaacag

SEQ ID NO: 9177 - DNA, 33 bp, homo sapiens
cactgtgaaaagaaaaygtattgactagagttt

SEQ ID NO: 9178 - DNA, 33 bp, homo sapiens
tctgggagattttccaygttgaaacaattcctt

SEQ ID NO: 9179 - DNA, 33 bp, homo sapiens
gtggtggagatttttcrcgtaagacactcattc

SEQ ID NO: 9180 - DNA, 33 bp, homo sapiens
cctccagcagcactggmaagttttgctattcac

SEQ ID NO: 9181 - DNA, 33 bp, homo sapiens
gaaaactgcttcaatawacagggagaaacccaa

SEQ ID NO: 9182 - DNA, 33 bp, homo sapiens
aacatagctttctttaygtttgttgctaaatag

SEQ ID NO: 9183 - DNA, 33 bp, homo sapiens
ctcaggcaatggtcacrctaggcaaaggcttct

SEQ ID NO: 9184 - DNA, 33 bp, homo sapiens
ctggtttcttttaaagycatgtgagcatactgg

SEQ ID NO: 9185 - DNA, 33 bp, homo sapiens
cactgaaatctgaaacrgtcaagccataacctc

SEQ ID NO: 9186 - DNA, 33 bp, homo sapiens
caatttgagagaaaggyaactagcgaggagagt

SEQ ID NO: 9187 - DNA, 33 bp, homo sapiens
ttcttctgatcactgaygacaggttcgctataa

SEQ ID NO: 9188 - DNA, 33 bp, homo sapiens
ctatgtcaccatgagayctggagaagggctcac

SEQ ID NO: 9189 - DNA, 33 bp, homo sapiens
agtcattcttggaccamaagtctttaaaatcac

SEQ ID NO: 9190 - DNA, 33 bp, homo sapiens
actggggaaagtgacarcctactcaaaaggaaa

SEQ ID NO: 9191 - DNA, 33 bp, homo sapiens
gcccagacatagcagcratgagagggcctcagg

SEQ ID NO: 9192 - DNA, 33 bp, homo sapiens
ttcaaccttgaaggatraaccatgtaaatgaag

SEQ ID NO: 9193 - DNA, 33 bp, homo sapiens
aaatggaataggatagraacttctagttacccc

SEQ ID NO: 9194 - DNA, 33 bp, homo sapiens
caccttgcgaggcagaytcctgggatttgaatc

SEQ ID NO: 9195 - DNA, 33 bp, homo sapiens
aggagcacggaaaagasctggaaatcatgcaga

SEQ ID NO: 9196 - DNA, 33 bp, homo sapiens
tgaaacgtttcaggtgkaagctgaggtaattaa

SEQ ID NO: 9197 - DNA, 33 bp, homo sapiens
aaagcacgtagagcaamagtgggacaaagaaca

SEQ ID NO: 9198 - DNA, 33 bp, homo sapiens
tacatctactaggttaygtttgtgaagcaacaa

SEQ ID NO: 9199 - DNA, 33 bp, homo sapiens
ttatataactcgacacrgtcaattcctttaaac

SEQ ID NO: 9200 - DNA, 33 bp, homo sapiens
ctaataacgataacacwacaattataagcacta

SEQ ID NO: 9201 - DNA, 33 bp, homo sapiens
gaacacacagacataastgatgttgattacagc

SEQ ID NO: 9202 - DNA, 33 bp, homo sapiens
gctttggctgataaaaygcagtgatggtccagg

SEQ ID NO: 9203 - DNA, 33 bp, homo sapiens
tattttgaagtgggaargccctacttacactat

SEQ ID NO: 9204 - DNA, 33 bp, homo sapiens
caacatcactgaacacmggtattattattccta

SEQ ID NO: 9205 - DNA, 33 bp, homo sapiens
tcagtctgctgtaacayacatctggaaagcatc

SEQ ID NO: 9206 - DNA, 33 bp, homo sapiens
aaggattatggccaccrgatctcaatgacctgg

SEQ ID NO: 9207 - DNA, 33 bp, homo sapiens
tccagagctggatgaasgttgagacattatgct

SEQ ID NO: 9208 - DNA, 33 bp, homo sapiens
aatttgtttaaatcaayggctctcttatctttt

SEQ ID NO: 9209 - DNA, 33 bp, homo sapiens
tctcagtccaaagaacratctccctgtcctgaa

SEQ ID NO: 9210 - DNA, 33 bp, homo sapiens
ttctgtaagctgaaaakagttatagaaatggat

SEQ ID NO: 9211 - DNA, 33 bp, homo sapiens
gcccataatggaccccraagtcaatattaagca

SEQ ID NO: 9212 - DNA, 33 bp, homo sapiens
tctcacctaatcctcayaagaagcctcacaaga

SEQ ID NO: 9213 - DNA, 33 bp, homo sapiens
tgggagaagatgtaaamaagtcagtatgtgaac

SEQ ID NO: 9214 - DNA, 33 bp, homo sapiens
agtgatttttgcaagaytcaagcaagatctagt

SEQ ID NO: 9215 - DNA, 33 bp, homo sapiens
cttgtggcattattcaycatggacaatggcatt

SEQ ID NO: 9216 - DNA, 33 bp, homo sapiens
ttcaatgcggaggacasgttcaaggccactgct

SEQ ID NO: 9217 - DNA, 33 bp, homo sapiens
tatgacttggttggcaygattcttgaccagcat

SEQ ID NO: 9218 - DNA, 33 bp, homo sapiens
caatcttccctgtttasgggtggtgtaaagatg

SEQ ID NO: 9219 - DNA, 33 bp, homo sapiens
ctctgtcacaactactsaacgctaccaccgtac

SEQ ID NO: 9220 - DNA, 33 bp, homo sapiens
ggaggaagaggcaaaayggaggattgtgttaag

SEQ ID NO: 9221 - DNA, 33 bp, homo sapiens
agtagaccgaggactargtggaaaggggaaaaa

SEQ ID NO: 9222 - DNA, 33 bp, homo sapiens
ataagctgtgacttccyaagtaagagagggcct

SEQ ID NO: 9223 - DNA, 33 bp, homo sapiens
atccagctctcttccaygactggttcctatgac

SEQ ID NO: 9224 - DNA, 33 bp, homo sapiens
gatttaggcagtatcaktgagaagagtctgaag

SEQ ID NO: 9225 - DNA, 33 bp, homo sapiens
tgatagcaactcagaarggaagccgggtccaag

SEQ ID NO: 9226 - DNA, 33 bp, homo sapiens
taggaggaaaaaaagaraagctactggctcctc

SEQ ID NO: 9227 - DNA, 33 bp, homo sapiens
gggagaaggctgctccraggcattgtcattgct

SEQ ID NO: 9228 - DNA, 33 bp, homo sapiens
agtaactagaatccagsaatattagggcaagaa

SEQ ID NO: 9229 - DNA, 33 bp, homo sapiens
tccaaaatgtttatgaragatgggatttggaat

SEQ ID NO: 9230 - DNA, 33 bp, homo sapiens
cccatcatgctcaaacraagaaagaaaggagcc

SEQ ID NO: 9231 - DNA, 33 bp, homo sapiens
ggaatcactaaatgctraagacttggggaacat

SEQ ID NO: 9232 - DNA, 33 bp, homo sapiens
gtgcttgtgtaattaargagatattcgccagct

SEQ ID NO: 9233 - DNA, 33 bp, homo sapiens
gaggcaaacaacagccrggatcatcctgtacag

SEQ ID NO: 9234 - DNA, 33 bp, homo sapiens
aaagcctatagagccaycagtcaggaacaaaac

SEQ ID NO: 9235 - DNA, 33 bp, homo sapiens
acttcttaatactcacrcattgggtcttagatt

SEQ ID NO: 9236 - DNA, 33 bp, homo sapiens
ctctgacaccgtggacyacatactattgcctag

SEQ ID NO: 9237 - DNA, 33 bp, homo sapiens
ttacaccactcttagaraatttggctgcttgaa

SEQ ID NO: 9238 - DNA, 33 bp, homo sapiens
aaaacaggggcaccgayggtgtaaacccagtaa

SEQ ID NO: 9239 - DNA, 33 bp, homo sapiens
gggtttttgatacagarggaggtaatagtctaa

SEQ ID NO: 9240 - DNA, 33 bp, homo sapiens
atagggatctgctttcyaagcccagtgataaca

SEQ ID NO: 9241 - DNA, 33 bp, homo sapiens
caaagaaacgtaaaagmattgcaaattatcata

SEQ ID NO: 9242 - DNA, 33 bp, homo sapiens
tcgttaggattaagaamcctcaatctagtagca

SEQ ID NO: 9243 - DNA, 33 bp, homo sapiens
ctatgaactgagattcyaatggtaagaaaacac

SEQ ID NO: 9244 - DNA, 33 bp, homo sapiens
ctttgcagatgggtaayattttggacacttcag

SEQ ID NO: 9245 - DNA, 33 bp, homo sapiens
ttgtaggtctatatagkaattggtgaacttttt

SEQ ID NO: 9246 - DNA, 33 bp, homo sapiens
aacgttttgagctgaakgatggagaacaaatta

SEQ ID NO: 9247 - DNA, 33 bp, homo sapiens
aatttctctagcaatarggactcccaaaagagg

SEQ ID NO: 9248 - DNA, 33 bp, homo sapiens
gcaacagttaacttccraagtacagtctggcca

SEQ ID NO: 9249 - DNA, 33 bp, homo sapiens
aagcacctacaaaaaartggaattaacagagct

SEQ ID NO: 9250 - DNA, 33 bp, homo sapiens
tgtggagccttctgacyggcttgatctgaacag

SEQ ID NO: 9251 - DNA, 33 bp, homo sapiens
ggtcatgtaatggttcraaagcattaaattacg

SEQ ID NO: 9252 - DNA, 33 bp, homo sapiens
ctgcactcagcctcaaycattcggagtctgtca

SEQ ID NO: 9253 - DNA, 33 bp, homo sapiens
aaggcaatgggaaatcygagtaatatgacaagt

SEQ ID NO: 9254 - DNA, 33 bp, homo sapiens
gatgccgtaaatagatyagccctttgcaaggag

SEQ ID NO: 9255 - DNA, 33 bp, homo sapiens
ggcactcgttgtgctcyaagtggctgtttgtgg

SEQ ID NO: 9256 - DNA, 33 bp, homo sapiens
cccctttacagcaagayatttaccgtttgtctg

SEQ ID NO: 9257 - DNA, 33 bp, homo sapiens
gcactcaagcaggtacrcaggcagagtggtggt

SEQ ID NO: 9258 - DNA, 33 bp, homo sapiens
gagactaatttgaccaygaccttctatttacta

SEQ ID NO: 9259 - DNA, 33 bp, homo sapiens
atcatatcttcaggacraaaagcctaaatggat

SEQ ID NO: 9260 - DNA, 33 bp, homo sapiens
aatgaatgaagacaaasgggaggtgcttgcgat

SEQ ID NO: 9261 - DNA, 33 bp, homo sapiens
gtgtatgagagaggcarggagagttcggagtaa

SEQ ID NO: 9262 - DNA, 33 bp, homo sapiens
agccacgatctggtacmaccacccatttaaccg

SEQ ID NO: 9263 - DNA, 33 bp, homo sapiens
agaaatggatccctgargataagctttgacgcc

SEQ ID NO: 9264 - DNA, 33 bp, homo sapiens
agacaagatcaggaacyggagtccctggaaaat

SEQ ID NO: 9265 - DNA, 33 bp, homo sapiens
tgcacatggtaaggaaratactctcttttcatc

SEQ ID NO: 9266 - DNA, 33 bp, homo sapiens
acccctccccactcaaygtacttgcataacatc

SEQ ID NO: 9267 - DNA, 33 bp, homo sapiens
tttcacttcagcttcarcactgaggcaactttc

SEQ ID NO: 9268 - DNA, 33 bp, homo sapiens
atccgagacaggaaccyggtcccctggctcagg

SEQ ID NO: 9269 - DNA, 33 bp, homo sapiens
gccttcaaagaacctayaagcctcatattacag

SEQ ID NO: 9270 - DNA, 33 bp, homo sapiens
aatgctgtggacgccgrccaaacagcttagcaa

SEQ ID NO: 9271 - DNA, 33 bp, homo sapiens
tgggaaaaagaggtccragtcatatttagggct

SEQ ID NO: 9272 - DNA, 33 bp, homo sapiens
agacaagtgagagtgtraagaatgcacaggctg

SEQ ID NO: 9273 - DNA, 33 bp, homo sapiens
cagctaaggaagcaaamccttgtcatccctccg

SEQ ID NO: 9274 - DNA, 33 bp, homo sapiens
atagcatataaattagyaaagggatcgtcctga

SEQ ID NO: 9275 - DNA, 33 bp, homo sapiens
aaagttttcagcagggwaagttcacacaagcat

SEQ ID NO: 9276 - DNA, 33 bp, homo sapiens
aagctatacgaattcartagatagaaactgtac

SEQ ID NO: 9277 - DNA, 33 bp, homo sapiens
ctgagtgctgtgcccartacaagaaggatggag

SEQ ID NO: 9278 - DNA, 33 bp, homo sapiens
ggcccttagatgtgacrccggagatgcacaggt

SEQ ID NO: 9279 - DNA, 33 bp, homo sapiens
tcaagacaagaaagacraaaccagttgaaagat

SEQ ID NO: 9280 - DNA, 33 bp, homo sapiens
atttgcataccttttgratatgtgaatacaaag

SEQ ID NO: 9281 - DNA, 33 bp, homo sapiens
aattttaatgccaagcwctcattaataattaac

SEQ ID NO: 9282 - DNA, 33 bp, homo sapiens
aaaatatattctggacrcagttcgctttatcac

SEQ ID NO: 9283 - DNA, 33 bp, homo sapiens
ctgagaaatgactctargcagattgctcacaca

SEQ ID NO: 9284 - DNA, 33 bp, homo sapiens
aggggaaccagctcccratgcccttggcttacc

SEQ ID NO: 9285 - DNA, 33 bp, homo sapiens
aaatcagttagaccccratggcaggtctccgct

SEQ ID NO: 9286 - DNA, 33 bp, homo sapiens
gctgtcactcattaaaygtgcccaatggtggca

SEQ ID NO: 9287 - DNA, 33 bp, homo sapiens
agccaaaatggaaggakcagtaagaattagcca

SEQ ID NO: 9288 - DNA, 33 bp, homo sapiens
tctcctgtaagtcaaaygacctcagttcctttt

SEQ ID NO: 9289 - DNA, 33 bp, homo sapiens
gctattcatgcttgacrattattttacatttca

SEQ ID NO: 9290 - DNA, 33 bp, homo sapiens
cctccaagtaagaaaaygtggttcctgctgatg

SEQ ID NO: 9291 - DNA, 33 bp, homo sapiens
cccataggctaaaatgyacttaccaatgaacaa

SEQ ID NO: 9292 - DNA, 33 bp, homo sapiens
ttttctgtttctagacrctccttgcacttcttg

SEQ ID NO: 9293 - DNA, 33 bp, homo sapiens
tttaccttaattttcaraatcagtgccttgtct

SEQ ID NO: 9294 - DNA, 33 bp, homo sapiens
gtctcaaatcactaacrcagacaaaatgggacc

SEQ ID NO: 9295 - DNA, 33 bp, homo sapiens
tggatttatcgccatamgattttgaaaattgtt

SEQ ID NO: 9296 - DNA, 33 bp, homo sapiens
gccatagtgtggataayatattgggagggacaa

SEQ ID NO: 9297 - DNA, 33 bp, homo sapiens
ctcccagaaggcctaasagtaaagcactctctt

SEQ ID NO: 9298 - DNA, 33 bp, homo sapiens
gacagatgatcagctarttccacaaataagtta

SEQ ID NO: 9299 - DNA, 33 bp, homo sapiens
aattcagtctacaagasaaactgacattgtctt

SEQ ID NO: 9300 - DNA, 33 bp, homo sapiens
tggggccagtgatggaygaagtgtactttggag

SEQ ID NO: 9301 - DNA, 33 bp, homo sapiens
cccctgttgcctatcaytgaggttttgaggcca

SEQ ID NO: 9302 - DNA, 33 bp, homo sapiens
tgttatctgtgaatgaraacagttttacttctt

SEQ ID NO: 9303 - DNA, 33 bp, homo sapiens
taatcagggtaaacaaygtatttatcgcctcaa

SEQ ID NO: 9304 - DNA, 33 bp, homo sapiens
tagcaaactaagaaacsatgagctgggctaatc

SEQ ID NO: 9305 - DNA, 33 bp, homo sapiens
atttagttctcatctgsacctatccactccagt

SEQ ID NO: 9306 - DNA, 33 bp, homo sapiens
gagttagacacagtccragatttaaaaccatcc

SEQ ID NO: 9307 - DNA, 33 bp, homo sapiens
agataaaaagagaaaaygtattggttgtgctga

SEQ ID NO: 9308 - DNA, 33 bp, homo sapiens
ttgtggaatgttaggawgtgagcttaagggcaa

SEQ ID NO: 9309 - DNA, 33 bp, homo sapiens
tatccacatgatctgayggaaaaattgattatt

SEQ ID NO: 9310 - DNA, 33 bp, homo sapiens
gataccaatgtaaatgmcagatgtatcaaagac

SEQ ID NO: 9311 - DNA, 33 bp, homo sapiens
tgaactcaggtccctgwatggtgggtttgggtg

SEQ ID NO: 9312 - DNA, 33 bp, homo sapiens
accatcaaccagatacragaaattcatcttacg

SEQ ID NO: 9313 - DNA, 33 bp, homo sapiens
acagagaaggacaggargaggtaaagacagata

SEQ ID NO: 9314 - DNA, 33 bp, homo sapiens
ggctccatgtcctgacraagaagtgcccagagg

SEQ ID NO: 9315 - DNA, 33 bp, homo sapiens
catacactgtttttcayggtggagcaggagggt

SEQ ID NO: 9316 - DNA, 33 bp, homo sapiens
ttggcaaatcttccagwctcagatggacacatc

SEQ ID NO: 9317 - DNA, 33 bp, homo sapiens
tgagtgtgggaacaagkctagtttgccaaaatg

SEQ ID NO: 9318 - DNA, 33 bp, homo sapiens
ttgtgtggaaattaacygaacttataactttga

SEQ ID NO: 9319 - DNA, 33 bp, homo sapiens
cagccccgagaatcaaytggtagacagtacacg

SEQ ID NO: 9320 - DNA, 33 bp, homo sapiens
aataaagcgtgagcagyagaaatcagcttggct

SEQ ID NO: 9321 - DNA, 33 bp, homo sapiens
aaatcagttcatgacayctcctctatcaccatg

SEQ ID NO: 9322 - DNA, 33 bp, homo sapiens
tcttctttggtgtgtayctatgaataatgcaga

SEQ ID NO: 9323 - DNA, 33 bp, homo sapiens
ctttgaagagccctgamaaatatactatctacc

SEQ ID NO: 9324 - DNA, 33 bp, homo sapiens
tctttcttccagcaacrgtctttagttcagttt

SEQ ID NO: 9325 - DNA, 33 bp, homo sapiens
aaggacagagtggaaakgatgaaggagccagct

SEQ ID NO: 9326 - DNA, 33 bp, homo sapiens
tgtgatgatgggaagaygagaaagctgaaggtt

SEQ ID NO: 9327 - DNA, 33 bp, homo sapiens
gaaacctcccccacagrctgctgcattgttgtt

SEQ ID NO: 9328 - DNA, 33 bp, homo sapiens
tgggggctcggaacaasaggagtttattgtctc

SEQ ID NO: 9329 - DNA, 33 bp, homo sapiens
aacaacagaaagcaaarctgaaacgactgctgg

SEQ ID NO: 9330 - DNA, 33 bp, homo sapiens
ccagaaactccctgtcmatcctatgtctaattt

SEQ ID NO: 9331 - DNA, 33 bp, homo sapiens
cagaacccagcctgagsacttccagtgggtgcc

SEQ ID NO: 9332 - DNA, 33 bp, homo sapiens
tctctgggctgaggaasatgaaggtgaaatcct

SEQ ID NO: 9333 - DNA, 33 bp, homo sapiens
ctttgggaaaattataycccagtcctgatgttt

SEQ ID NO: 9334 - DNA, 33 bp, homo sapiens
cattttcctttctaacrctcctgaggctgggca

SEQ ID NO: 9335 - DNA, 33 bp, homo sapiens
tactgataaatgctcargatgacaagtataagt

SEQ ID NO: 9336 - DNA, 33 bp, homo sapiens
gtttgatggatgaatargtaagtgagggaatga

SEQ ID NO: 9337 - DNA, 33 bp, homo sapiens
tccaatggaaagcaagyaccaaatcagagcttt

SEQ ID NO: 9338 - DNA, 33 bp, homo sapiens
acccagggtggttgacratgtgaatccccggct

SEQ ID NO: 9339 - DNA, 33 bp, homo sapiens
cataagaaactctccaygagccatttgtgtgaa

SEQ ID NO: 9340 - DNA, 33 bp, homo sapiens
ctcagagtactttgctyaccacctctgacagtc

SEQ ID NO: 9341 - DNA, 33 bp, homo sapiens
gtttctattgatcagastatatgagcctcttta

SEQ ID NO: 9342 - DNA, 33 bp, homo sapiens
gggttcaattttggtaygctgtattttcctgga

SEQ ID NO: 9343 - DNA, 33 bp, homo sapiens
taactggttatagctgyagcacctctttctatt

SEQ ID NO: 9344 - DNA, 33 bp, homo sapiens
gaatctccatgaagaawcctttgcagtaacaac

SEQ ID NO: 9345 - DNA, 33 bp, homo sapiens
ccgaccccgaaagtcayaaaccctgatgcaaat

SEQ ID NO: 9346 - DNA, 33 bp, homo sapiens
ggaggccgccagggaamgtgaacatctacggtt

SEQ ID NO: 9347 - DNA, 33 bp, homo sapiens
aaaatcaatgtctaaamcgctctgcaccaggaa

SEQ ID NO: 9348 - DNA, 33 bp, homo sapiens
agtgagcaatttgtccraagtctgggtaatagg

SEQ ID NO: 9349 - DNA, 33 bp, homo sapiens
ctgtcatttctcataakacagaacaaatacgtt

SEQ ID NO: 9350 - DNA, 33 bp, homo sapiens
tctcttggaaggaaccracacgcccaccacctt

SEQ ID NO: 9351 - DNA, 33 bp, homo sapiens
aataagaagtacaggcrgatttgaaggatgtca

SEQ ID NO: 9352 - DNA, 33 bp, homo sapiens
cctggcttccccctccragatgcccttcctcca

SEQ ID NO: 9353 - DNA, 33 bp, homo sapiens
tttagggaagaacaagmaaaacaagcctctgca

SEQ ID NO: 9354 - DNA, 33 bp, homo sapiens
ctgtgttcaaagaccaygccctgacagcgcccg

SEQ ID NO: 9355 - DNA, 33 bp, homo sapiens
ttaaactttaaatggcrcgtgacttaggtcaga

SEQ ID NO: 9356 - DNA, 33 bp, homo sapiens
ccggaaaatattggagratggaacacttcccaa

SEQ ID NO: 9357 - DNA, 33 bp, homo sapiens
tcatctcagtacccatmatccatggtgtgtaac

SEQ ID NO: 9358 - DNA, 33 bp, homo sapiens
ggagatgtgaacgtccygatgtccaggccatgc

SEQ ID NO: 9359 - DNA, 33 bp, homo sapiens
gattgagtgcgattccrgacatttcagtagttt

SEQ ID NO: 9360 - DNA, 33 bp, homo sapiens
taggcttcttggccaamtggagagcttggactt

SEQ ID NO: 9361 - DNA, 33 bp, homo sapiens
agcttccacgtgaaggkcatgtcgtttgctttc

SEQ ID NO: 9362 - DNA, 33 bp, homo sapiens
aatatgtgtagaatccrcagtggcgtcacctgt

SEQ ID NO: 9363 - DNA, 33 bp, homo sapiens
ttgggccccgagtctcyataactgttggggtga

SEQ ID NO: 9364 - DNA, 33 bp, homo sapiens
aagtcccataaatggcygaatggcagaattagt

SEQ ID NO: 9365 - DNA, 33 bp, homo sapiens
gcctcttctccagacaytggaaatccgcataac

SEQ ID NO: 9366 - DNA, 33 bp, homo sapiens
tgggcctcacaaatgayggagcttgtcgagttc

SEQ ID NO: 9367 - DNA, 33 bp, homo sapiens
agagtggaatatggacratggtaggtgtatgaa

SEQ ID NO: 9368 - DNA, 33 bp, homo sapiens
taaacgtaggagtgcgsatctgtccctgctgga

SEQ ID NO: 9369 - DNA, 33 bp, homo sapiens
cagtcacagaggcaaaygaagaatgtagagctc

SEQ ID NO: 9370 - DNA, 33 bp, homo sapiens
gtggctgaaaaccacasaaattcatcctctcac

SEQ ID NO: 9371 - DNA, 33 bp, homo sapiens
aggctttactgacacamattttcctcaatccct

SEQ ID NO: 9372 - DNA, 33 bp, homo sapiens
agggtagactcaagacratgtttcgcaaaatct

SEQ ID NO: 9373 - DNA, 33 bp, homo sapiens
atagctgtacatataaragataagacagacttt

SEQ ID NO: 9374 - DNA, 33 bp, homo sapiens
tggtgggactgtcaacragttcatccattgtgg

SEQ ID NO: 9375 - DNA, 33 bp, homo sapiens
taaagcagaagacttaycttatgattgcttttc

SEQ ID NO: 9376 - DNA, 33 bp, homo sapiens
cctggtattttgaaatyagtcttatctagagca

SEQ ID NO: 9377 - DNA, 33 bp, homo sapiens
ccaggggcagtttcaasagagtggagaagtagt

SEQ ID NO: 9378 - DNA, 33 bp, homo sapiens
ttgcattaatactttcragcacctgattattga

SEQ ID NO: 9379 - DNA, 33 bp, homo sapiens
cattcaactctgacacyagttctatcttgtaag

SEQ ID NO: 9380 - DNA, 33 bp, homo sapiens
ttatcaatttccctccrataagaacttcaagga

SEQ ID NO: 9381 - DNA, 33 bp, homo sapiens
gtagattttatcaaaamattggcatatctccac

SEQ ID NO: 9382 - DNA, 33 bp, homo sapiens
tctcaatagaaatcacrcagtccaagagagagt

SEQ ID NO: 9383 - DNA, 33 bp, homo sapiens
atcaggtcaaggacaaraagatgatcctaaaag

SEQ ID NO: 9384 - DNA, 33 bp, homo sapiens
ttgttcgaagaaaggaycatctggaattctttt

SEQ ID NO: 9385 - DNA, 33 bp, homo sapiens
gattctaagaatctcarcaaaagcagcaaattc

SEQ ID NO: 9386 - DNA, 33 bp, homo sapiens
aagtctagatcctgtcmcaatcccgataacaca

SEQ ID NO: 9387 - DNA, 33 bp, homo sapiens
tggcattgtctctaagyccagatatggctgtgg

SEQ ID NO: 9388 - DNA, 33 bp, homo sapiens
aacaaaatcaagaactsaatttcattaacaata

SEQ ID NO: 9389 - DNA, 33 bp, homo sapiens
caaagttttgttccctyacttcatttatccctc

SEQ ID NO: 9390 - DNA, 33 bp, homo sapiens
cttttttgagcactcawtacaaacttatttaat

SEQ ID NO: 9391 - DNA, 33 bp, homo sapiens
taaaaaacaaaagttaygcatctgaaatcataa

SEQ ID NO: 9392 - DNA, 33 bp, homo sapiens
gatggtggtgccacccracaaggtgaatcccga

SEQ ID NO: 9393 - DNA, 33 bp, homo sapiens
tagtaaaaagaggggcrgatataatgcttacca

SEQ ID NO: 9394 - DNA, 33 bp, homo sapiens
ctccagaagctgttaaygacctttgccctctga

SEQ ID NO: 9395 - DNA, 33 bp, homo sapiens
catctcctggtacttcyactatgagttaataag

SEQ ID NO: 9396 - DNA, 33 bp, homo sapiens
agccaaagaaagaaaasttgcttcttctggcca

SEQ ID NO: 9397 - DNA, 33 bp, homo sapiens
gcaggatcctgcagaastgaggagctgaatctc

SEQ ID NO: 9398 - DNA, 33 bp, homo sapiens
tctgtgacaacaactckcatcataggcccagag

SEQ ID NO: 9399 - DNA, 33 bp, homo sapiens
ggatggtagattcaaayaagaccaggtcccctg

SEQ ID NO: 9400 - DNA, 33 bp, homo sapiens
cttatgtcctggtaacraatgtcctattccttg

SEQ ID NO: 9401 - DNA, 33 bp, homo sapiens
gtctattatttgatcaygtggccataagaaatt

SEQ ID NO: 9402 - DNA, 33 bp, homo sapiens
ttgctatgttcatttayctagcccataagccac

SEQ ID NO: 9403 - DNA, 33 bp, homo sapiens
atgcatcttgaaaaaaycaacaacaatgtcaac

SEQ ID NO: 9404 - DNA, 33 bp, homo sapiens
tatctttcagagacaayggtaggatcgcccttg

SEQ ID NO: 9405 - DNA, 33 bp, homo sapiens
aggcttccctggagaaratcagtcctaatggaa

SEQ ID NO: 9406 - DNA, 33 bp, homo sapiens
ctggactcctggtcagmagactctagtttgccc

SEQ ID NO: 9407 - DNA, 33 bp, homo sapiens
tgggcatggtgctctcycccttcaaaggcagcc

SEQ ID NO: 9408 - DNA, 33 bp, homo sapiens
gggaacaggtttgagaygggtgcatcacggttt

SEQ ID NO: 9409 - DNA, 33 bp, homo sapiens
aaaggggtatacataargtttctgagatcctgg

SEQ ID NO: 9410 - DNA, 33 bp, homo sapiens
ctctgggttgagcttasaagtctgtcttaggat

SEQ ID NO: 9411 - DNA, 33 bp, homo sapiens
aaggggggcagtatgawattgtaactatggttc

SEQ ID NO: 9412 - DNA, 33 bp, homo sapiens
gaaacaccaaagatcckgcaaagtatctcctgt

SEQ ID NO: 9413 - DNA, 33 bp, homo sapiens
aggcagttaaaggaagsattcatttgcaggaga

SEQ ID NO: 9414 - DNA, 33 bp, homo sapiens
gaaaaactggactgaamgatggtttgtactaaa

SEQ ID NO: 9415 - DNA, 33 bp, homo sapiens
cctgaagagattagctmagagtctagtaccttt

SEQ ID NO: 9416 - DNA, 33 bp, homo sapiens
atgactctagagaccasaaaagtaaaggcaata

SEQ ID NO: 9417 - DNA, 33 bp, homo sapiens
gggtcactttcagaggkagttttaagtgttggg

SEQ ID NO: 9418 - DNA, 33 bp, homo sapiens
tgtgatagagaacaaayttctaaatactggata

SEQ ID NO: 9419 - DNA, 33 bp, homo sapiens
ttcaggctgcagagacwcgaaagccaggccagg

SEQ ID NO: 9420 - DNA, 33 bp, homo sapiens
tcagctcagtggcaaargtgagtctccagcagg

SEQ ID NO: 9421 - DNA, 33 bp, homo sapiens
ccacctctccatggtgraaaaatgactcccctg

SEQ ID NO: 9422 - DNA, 33 bp, homo sapiens
gtgtgaaacagcatcaraataggaagatacaga

SEQ ID NO: 9423 - DNA, 33 bp, homo sapiens
agagatacatacagaaytgtgcctgtactatgt

SEQ ID NO: 9424 - DNA, 33 bp, homo sapiens
ccccgggcaaggcaaakacagacaacaggacac

SEQ ID NO: 9425 - DNA, 33 bp, homo sapiens
gaagctgcctcaaaaayatgataacttcctcca

SEQ ID NO: 9426 - DNA, 33 bp, homo sapiens
aatgctgaaatgatcartagtgttaaacaggag

SEQ ID NO: 9427 - DNA, 33 bp, homo sapiens
agaaacagacataccascagagatttacttttt

SEQ ID NO: 9428 - DNA, 33 bp, homo sapiens
ctctactacttggtaartctgcatatatatact

SEQ ID NO: 9429 - DNA, 33 bp, homo sapiens
caaaggcacagagagargaaagaacttagtgta

SEQ ID NO: 9430 - DNA, 33 bp, homo sapiens
tctatttgtctgctaawtagaatgaagtaagtg

SEQ ID NO: 9431 - DNA, 33 bp, homo sapiens
aaggaagtgagctcaawgttttagctttctact

SEQ ID NO: 9432 - DNA, 33 bp, homo sapiens
ttttgaatgaatcacartataccaataccaaca

SEQ ID NO: 9433 - DNA, 33 bp, homo sapiens
ttgtcaatatcctcaarataacttgccagaatt

SEQ ID NO: 9434 - DNA, 33 bp, homo sapiens
tgttcgcagtcgcatawtacaaccatgtttcac

SEQ ID NO: 9435 - DNA, 33 bp, homo sapiens
cagaagatgaaggtgcrcaggcatcacattgtg

SEQ ID NO: 9436 - DNA, 33 bp, homo sapiens
gtatctgttggaaaaamaattctaagtggcaaa

SEQ ID NO: 9437 - DNA, 33 bp, homo sapiens
gatggtttgtgtgtatragggggtgcttggtag

SEQ ID NO: 9438 - DNA, 33 bp, homo sapiens
gtgacagggtgagtcastgaaaccttctctaac

SEQ ID NO: 9439 - DNA, 33 bp, homo sapiens
cccccatgactggggcraccactctctgaagct

SEQ ID NO: 9440 - DNA, 33 bp, homo sapiens
ttcaatttactgagaayctatattgtgactggg

SEQ ID NO: 9441 - DNA, 33 bp, homo sapiens
actgagattcagggcamctaagtaatttgtcca

SEQ ID NO: 9442 - DNA, 33 bp, homo sapiens
ttgaatcaagataccartaagacatttctccat

SEQ ID NO: 9443 - DNA, 33 bp, homo sapiens
tacgcatttggatttaygaagtgctcagattgt

SEQ ID NO: 9444 - DNA, 33 bp, homo sapiens
tcagggaacaactcaargaagtggtaaagcatt

SEQ ID NO: 9445 - DNA, 33 bp, homo sapiens
tcagactcattaaggcrattctgttctgatgtt

SEQ ID NO: 9446 - DNA, 33 bp, homo sapiens
agatgtgggtggaaacmctggtcacaggggcat

SEQ ID NO: 9447 - DNA, 33 bp, homo sapiens
acagtctaaggcaatamagacaaaacccaattt

SEQ ID NO: 9448 - DNA, 33 bp, homo sapiens
caaaggagagattaggwattgaagagagtataa

SEQ ID NO: 9449 - DNA, 33 bp, homo sapiens
agccaggagaagcaagwccacattacattttgg

SEQ ID NO: 9450 - DNA, 33 bp, homo sapiens
gtttaaatccacaaaaktgcccaggaagccatg

SEQ ID NO: 9451 - DNA, 33 bp, homo sapiens
ctgcttggatgcataaytggaacttgaggtcaa

SEQ ID NO: 9452 - DNA, 33 bp, homo sapiens
ctgacctgctgatgacyggcttggattctccac

SEQ ID NO: 9453 - DNA, 33 bp, homo sapiens
tgcctgctgttatgagmattgcctgctgttatt

SEQ ID NO: 9454 - DNA, 33 bp, homo sapiens
aagtcgctacccagaarctctggctggacacac

SEQ ID NO: 9455 - DNA, 33 bp, homo sapiens
tacttcaaagatgatamaactccactaatattc

SEQ ID NO: 9456 - DNA, 33 bp, homo sapiens
ggaaggcaagttatgcmctaaaagctgggtcag

SEQ ID NO: 9457 - DNA, 33 bp, homo sapiens
tatttgatggactcacrggtattctctttttct

SEQ ID NO: 9458 - DNA, 33 bp, homo sapiens
ctagaagtgaaccaaayaccatgtgtaagccaa

SEQ ID NO: 9459 - DNA, 33 bp, homo sapiens
aacacttgtgtgtctarattttacagatgcttg

SEQ ID NO: 9460 - DNA, 33 bp, homo sapiens
caatattttttttcaayctggagtagatacaga

SEQ ID NO: 9461 - DNA, 33 bp, homo sapiens
atcagtaaacaatgtcrccaataaacacttccc

SEQ ID NO: 9462 - DNA, 33 bp, homo sapiens
tcagatcctaacttacraggtgtgtgagctagc

SEQ ID NO: 9463 - DNA, 33 bp, homo sapiens
gggtcgggatttgaggmcaggctctagtgtgaa

SEQ ID NO: 9464 - DNA, 33 bp, homo sapiens
catcctctcagcacaaytctgactccaaccact

SEQ ID NO: 9465 - DNA, 33 bp, homo sapiens
ttgctttacatttgcartaaaacaaagatcatc

SEQ ID NO: 9466 - DNA, 33 bp, homo sapiens
tgtgagccaaatagatyacttcttatcagcatt

SEQ ID NO: 9467 - DNA, 33 bp, homo sapiens
cctcagaggtttattgmaggtatccactgttag

SEQ ID NO: 9468 - DNA, 33 bp, homo sapiens
taacacaaccacctaartgccttttaattttgc

SEQ ID NO: 9469 - DNA, 33 bp, homo sapiens
gtcctgcactaaaaccmgataaatgagaatgat

SEQ ID NO: 9470 - DNA, 33 bp, homo sapiens
gttctccagcacttctkacccaatgagcacatg

SEQ ID NO: 9471 - DNA, 33 bp, homo sapiens
ataagtaaatgaatgaygcaaacaaaattggag

SEQ ID NO: 9472 - DNA, 33 bp, homo sapiens
gtggctggaaggaacamgacattagagaaagaa

SEQ ID NO: 9473 - DNA, 33 bp, homo sapiens
aaaaccaagaatgtgawccctttgtcgtctggt

SEQ ID NO: 9474 - DNA, 33 bp, homo sapiens
aggagcttcaccattargccctaccagctccca

SEQ ID NO: 9475 - DNA, 33 bp, homo sapiens
ctggcagtaaggcgccsataaactctgaaaagc

SEQ ID NO: 9476 - DNA, 33 bp, homo sapiens
acagctcttttaactargcaagggaaatggtct

SEQ ID NO: 9477 - DNA, 33 bp, homo sapiens
aaagtcgcggcttccaygaacctattgatgatg

SEQ ID NO: 9478 - DNA, 33 bp, homo sapiens
ctgtgagggatgtttaygtgaagactaatttta

SEQ ID NO: 9479 - DNA, 33 bp, homo sapiens
atagtagtcatatgcamccttattattattttt

SEQ ID NO: 9480 - DNA, 33 bp, homo sapiens
aatactttaaatgtcarctagtaattggatggg

SEQ ID NO: 9481 - DNA, 33 bp, homo sapiens
tgttggagcactgttargtactattgtgggaga

SEQ ID NO: 9482 - DNA, 33 bp, homo sapiens
caaagatagtaagtaascaggatcccgatatca

SEQ ID NO: 9483 - DNA, 33 bp, homo sapiens
gtagactatttcaggaygttataggcagtggaa

SEQ ID NO: 9484 - DNA, 33 bp, homo sapiens
gcaaggaacaatctcascaaatctacataagaa

SEQ ID NO: 9485 - DNA, 33 bp, homo sapiens
aaggaacaatctgccaytgcagggaaaaaagca

SEQ ID NO: 9486 - DNA, 33 bp, homo sapiens
taactaaaattatgtawccttcaagcaacatct

SEQ ID NO: 9487 - DNA, 33 bp, homo sapiens
ttcctattggattacartctcagagaccagtct

SEQ ID NO: 9488 - DNA, 33 bp, homo sapiens
tggttctgtccaaaaaytcattgacagactaaa

SEQ ID NO: 9489 - DNA, 33 bp, homo sapiens
atgacctcacccaaccracagtcttctgggcca

SEQ ID NO: 9490 - DNA, 33 bp, homo sapiens
gtgcatttacctcataygctaggagttgccacc

SEQ ID NO: 9491 - DNA, 33 bp, homo sapiens
atgcttccaaagctcaracattcactagtttac

SEQ ID NO: 9492 - DNA, 33 bp, homo sapiens
ggaattgccaaaaagcrctgtactctagtagat

SEQ ID NO: 9493 - DNA, 33 bp, homo sapiens
tcgacactatttctaayctttgtcatataaaca

SEQ ID NO: 9494 - DNA, 33 bp, homo sapiens
ggagaacagaccctccwgccttgtgcttatcac

SEQ ID NO: 9495 - DNA, 33 bp, homo sapiens
tggcacacgtgagggaygcaagctggactccct

SEQ ID NO: 9496 - DNA, 33 bp, homo sapiens
taggatacagattagayggctgtgattacaaaa

SEQ ID NO: 9497 - DNA, 33 bp, homo sapiens
ttttaccctttgctccmatctcagtgtttaatc

SEQ ID NO: 9498 - DNA, 33 bp, homo sapiens
gacaactctacaattcrcccagcttgtaccctc

SEQ ID NO: 9499 - DNA, 33 bp, homo sapiens
atataagacttccaaaytcaggtgcatcctgta

SEQ ID NO: 9500 - DNA, 33 bp, homo sapiens
aaagaacaatattgtawggtcaaattctacgag

SEQ ID NO: 9501 - DNA, 33 bp, homo sapiens
tgcacaattcctgaaamgattgttaagagaccc

SEQ ID NO: 9502 - DNA, 33 bp, homo sapiens
ccagagcaactgatcaygtaaatccaatttgag

SEQ ID NO: 9503 - DNA, 33 bp, homo sapiens
agtgtctagcacattayaaacattcagtaattg

SEQ ID NO: 9504 - DNA, 33 bp, homo sapiens
gattgggcactacaggycagaagcccaggatcc

SEQ ID NO: 9505 - DNA, 33 bp, homo sapiens
gtggtctggatcacaayactatttatcttcagt

SEQ ID NO: 9506 - DNA, 33 bp, homo sapiens
agtcattgcctacaacyccgagaggcagaaggg

SEQ ID NO: 9507 - DNA, 33 bp, homo sapiens
catctggtccccctccyatgatggtttggcagc

SEQ ID NO: 9508 - DNA, 33 bp, homo sapiens
ccacctgacatcacacraggaaaacaaggctcg

SEQ ID NO: 9509 - DNA, 33 bp, homo sapiens
atctttgcctccgtctraaacggtatgattcca

SEQ ID NO: 9510 - DNA, 33 bp, homo sapiens
ttagtctgggttgatayctaaacacctgcattt

SEQ ID NO: 9511 - DNA, 33 bp, homo sapiens
ctgtgctcaattttaasatcactgaagtgtgga

SEQ ID NO: 9512 - DNA, 33 bp, homo sapiens
tcaagggcattgcccasaggacttttagccggg

SEQ ID NO: 9513 - DNA, 33 bp, homo sapiens
attaagctgagttcgckctcttttttcaccttt

SEQ ID NO: 9514 - DNA, 33 bp, homo sapiens
gaaagtataccttcacmctgaatagatgaggaa

SEQ ID NO: 9515 - DNA, 33 bp, homo sapiens
ggttttaagcaggagcrcttcagcttagatgca

SEQ ID NO: 9516 - DNA, 33 bp, homo sapiens
gtccaagtccagaaccygggctattattcaatt

SEQ ID NO: 9517 - DNA, 33 bp, homo sapiens
tcctgttacgttcttaygagcctgaagggcagc

SEQ ID NO: 9518 - DNA, 33 bp, homo sapiens
tgcctttacacccttaygctgatggcagttcca

SEQ ID NO: 9519 - DNA, 33 bp, homo sapiens
gatgtcttctaggctayggtaaaaagttcagat

SEQ ID NO: 9520 - DNA, 33 bp, homo sapiens
cacaggctgattactgyagaaatgtatgacatg

SEQ ID NO: 9521 - DNA, 33 bp, homo sapiens
ttcattcatccactaamattttcacctataatg

SEQ ID NO: 9522 - DNA, 33 bp, homo sapiens
aagatctcaatcaacarggaactatgtatagtg

SEQ ID NO: 9523 - DNA, 33 bp, homo sapiens
gttagagctgggaaaasagtaaagaatgtaaag

SEQ ID NO: 9524 - DNA, 33 bp, homo sapiens
cattttgcctcttaaastgcattcttgagtcca

SEQ ID NO: 9525 - DNA, 33 bp, homo sapiens
aaactttagaccagaartgaaagtttatcaaaa

SEQ ID NO: 9526 - DNA, 33 bp, homo sapiens
gaacacaaatgaaagcratttggaagtaatatt

SEQ ID NO: 9527 - DNA, 33 bp, homo sapiens
caaggataagataaggraaaaaaaggatgagag

SEQ ID NO: 9528 - DNA, 33 bp, homo sapiens
aatatcataggatgcamgactgaaaacctaatc

SEQ ID NO: 9529 - DNA, 33 bp, homo sapiens
agaagagcatggataakgattttgaacattaca

SEQ ID NO: 9530 - DNA, 33 bp, homo sapiens
ccctcttctccaaagcrgaagtctccagagttg

SEQ ID NO: 9531 - DNA, 33 bp, homo sapiens
aaaattactgaatgaaygagttgagagggtgtg

SEQ ID NO: 9532 - DNA, 33 bp, homo sapiens
ttgctgacataaagaamtgctgatcttcaaaac

SEQ ID NO: 9533 - DNA, 33 bp, homo sapiens
gagatggtaaaactacyggagaaatgttctcaa

SEQ ID NO: 9534 - DNA, 33 bp, homo sapiens
ccttaagacttttggcygattaaatggtgctta

SEQ ID NO: 9535 - DNA, 33 bp, homo sapiens
ggctagttgaacattaygcttactatttgtttt

SEQ ID NO: 9536 - DNA, 33 bp, homo sapiens
ctacccatctgttttckcatgctatctacttca

SEQ ID NO: 9537 - DNA, 33 bp, homo sapiens
tagtagtctttcaaggrcaataaatattgccct

SEQ ID NO: 9538 - DNA, 33 bp, homo sapiens
tagaaacagtaggaaargagaaatggctattta

SEQ ID NO: 9539 - DNA, 33 bp, homo sapiens
ccacactgcttggccaytgatatgatttgaatg

SEQ ID NO: 9540 - DNA, 33 bp, homo sapiens
ttatttctctttccgarctgtgtttccctgagc

SEQ ID NO: 9541 - DNA, 33 bp, homo sapiens
taattaaattaccacarattgagtgatgcaaaa

SEQ ID NO: 9542 - DNA, 33 bp, homo sapiens
gcacagagagactgagycattttaaaaaggaac

SEQ ID NO: 9543 - DNA, 33 bp, homo sapiens
tgcaactcaaagtttarccgtctatgtattatt

SEQ ID NO: 9544 - DNA, 33 bp, homo sapiens
atatggagatcaaatargaaatatgaagagaaa

SEQ ID NO: 9545 - DNA, 33 bp, homo sapiens
aatgggagaacataacwgcaaactatatatgca

SEQ ID NO: 9546 - DNA, 33 bp, homo sapiens
caaaaaattaagccacmgccaaatgatcttcta

SEQ ID NO: 9547 - DNA, 33 bp, homo sapiens
gggatgggagtacaatkatcccaagtggttcac

SEQ ID NO: 9548 - DNA, 33 bp, homo sapiens
tatggaataaaactaawtgcccattaagagatg

SEQ ID NO: 9549 - DNA, 33 bp, homo sapiens
aacaatgataatctgaygacagtgaaagaagtc

SEQ ID NO: 9550 - DNA, 33 bp, homo sapiens
tatctatctcaaaaacscacagcttgtctgaat

SEQ ID NO: 9551 - DNA, 33 bp, homo sapiens
tgaagccaacctgcaayaggtaagagtaaagtg

SEQ ID NO: 9552 - DNA, 33 bp, homo sapiens
ggattaagagaaagccrccttttagatagctct

SEQ ID NO: 9553 - DNA, 33 bp, homo sapiens
tgctgtttctggaacakattttaaacgagggga

SEQ ID NO: 9554 - DNA, 33 bp, homo sapiens
atgacagtaaggataasataaactgcagatgct

SEQ ID NO: 9555 - DNA, 33 bp, homo sapiens
cttagaacgtgactcaygactcattttagaatc

SEQ ID NO: 9556 - DNA, 33 bp, homo sapiens
gctcccacatgacttcyatagcatctatacatg

SEQ ID NO: 9557 - DNA, 33 bp, homo sapiens
gagagtagatattgtcwgaaaagggtaattcct

SEQ ID NO: 9558 - DNA, 33 bp, homo sapiens
atgtggcccattaacaycattacagttatttgt

SEQ ID NO: 9559 - DNA, 33 bp, homo sapiens
cagtgaataaactaacrgccttaaacaaatatt

SEQ ID NO: 9560 - DNA, 33 bp, homo sapiens
tgtggtgtgactccaaytcaaacactttagaat

SEQ ID NO: 9561 - DNA, 33 bp, homo sapiens
ctcaggatctacttcayggggaatccaagttga

SEQ ID NO: 9562 - DNA, 33 bp, homo sapiens
cagactttgtaagctaytacccttggaagatcc

SEQ ID NO: 9563 - DNA, 33 bp, homo sapiens
aatggggattctgataycaacctaaaggagttg

SEQ ID NO: 9564 - DNA, 33 bp, homo sapiens
gagtgacagtcataatmagcaatagaattagta

SEQ ID NO: 9565 - DNA, 33 bp, homo sapiens
taaaaattgaaggagawctcattaactgttgtg

SEQ ID NO: 9566 - DNA, 33 bp, homo sapiens
gccccaggtttattccwcagctcggaagttaaa

SEQ ID NO: 9567 - DNA, 33 bp, homo sapiens
catttaaccttgcagakcctcagctttctcata

SEQ ID NO: 9568 - DNA, 33 bp, homo sapiens
ttttgccagcataaaasgggaaaaaaataccac

SEQ ID NO: 9569 - DNA, 33 bp, homo sapiens
tacaggcatatgtccargatattttgggttcgg

SEQ ID NO: 9570 - DNA, 33 bp, homo sapiens
tctaaaatattattgcycaaaagttgtgtcaca

SEQ ID NO: 9571 - DNA, 33 bp, homo sapiens
ttatgggcaaggatgasaaaacaggtttttctc

SEQ ID NO: 9572 - DNA, 33 bp, homo sapiens
acattattggcataccraactgaattactttat

SEQ ID NO: 9573 - DNA, 33 bp, homo sapiens
aacacacaaaaacccayatcctaccagagactg

SEQ ID NO: 9574 - DNA, 33 bp, homo sapiens
aatttttaaggagacaraaatagagcctaagaa

SEQ ID NO: 9575 - DNA, 33 bp, homo sapiens
ggttgcctgggtaacartgagctattcttggcc

SEQ ID NO: 9576 - DNA, 33 bp, homo sapiens
acgagaagcaaaacaamcaggatccctgcatcc

SEQ ID NO: 9577 - DNA, 33 bp, homo sapiens
tatctcatgttgaacaytggcttaaacattaca

SEQ ID NO: 9578 - DNA, 33 bp, homo sapiens
ggtgagagctcaggaaraaagtaatattagtgt

SEQ ID NO: 9579 - DNA, 33 bp, homo sapiens
acaacgagggtctaaawctccattccaagatag

SEQ ID NO: 9580 - DNA, 33 bp, homo sapiens
atagtttatcaggaaarcaaggctgaatatgtg

SEQ ID NO: 9581 - DNA, 33 bp, homo sapiens
cagaccacctttaaaaygtctgcaaacaacctc

SEQ ID NO: 9582 - DNA, 33 bp, homo sapiens
aaaatgggtgatatgayaaatgaaataggagtc

SEQ ID NO: 9583 - DNA, 33 bp, homo sapiens
cagtgatttattttaawgtatccagcccatcca

SEQ ID NO: 9584 - DNA, 33 bp, homo sapiens
tcggcagcacatatacraaaaaattagattaaa

SEQ ID NO: 9585 - DNA, 33 bp, homo sapiens
aattggacttggtcaaygattggatgtgaaggc

SEQ ID NO: 9586 - DNA, 33 bp, homo sapiens
attcatgccatttcaarcagataacattaatta

SEQ ID NO: 9587 - DNA, 33 bp, homo sapiens
gaaaagctacagaattsaaatgagctgaaggta

SEQ ID NO: 9588 - DNA, 33 bp, homo sapiens
actgttcagacttaatkatcgtgaaattttaaa

SEQ ID NO: 9589 - DNA, 33 bp, homo sapiens
tctgttatttgcagccraggcatcctgataaca

SEQ ID NO: 9590 - DNA, 33 bp, homo sapiens
gaaacaaatatacgagratatatgacatcaaga

SEQ ID NO: 9591 - DNA, 33 bp, homo sapiens
aggcagaaatagccacyccttgctcacattccc

SEQ ID NO: 9592 - DNA, 33 bp, homo sapiens
gaaaatgtggtagcaartattgcagagctctat

SEQ ID NO: 9593 - DNA, 33 bp, homo sapiens
tcatggcaattgcatgrcacttgtttgtgctat

SEQ ID NO: 9594 - DNA, 33 bp, homo sapiens
gaccagatgctagaagraacctcagagatcacc

SEQ ID NO: 9595 - DNA, 33 bp, homo sapiens
cagagtcaaagtgtaaycccaggctggacacgg

SEQ ID NO: 9596 - DNA, 33 bp, homo sapiens
ctcacggctaacgggawgcctggaccagatata

SEQ ID NO: 9597 - DNA, 33 bp, homo sapiens
ccacctctgctatatcygaactgttcagccccc

SEQ ID NO: 9598 - DNA, 33 bp, homo sapiens
gtaaatgagtagatacyaagtggtctgtgagag

SEQ ID NO: 9599 - DNA, 33 bp, homo sapiens
gtgacagggtgacaacraatgtaaatagactaa

SEQ ID NO: 9600 - DNA, 33 bp, homo sapiens
gctgtggctgattaggmccataaattttgagtg

SEQ ID NO: 9601 - DNA, 33 bp, homo sapiens
actctgctattcctcaratgacctcttcattcc

SEQ ID NO: 9602 - DNA, 33 bp, homo sapiens
gatctagcaggtgtagkaagatgtcacctaagt

SEQ ID NO: 9603 - DNA, 33 bp, homo sapiens
cttcaactttttcctarctatcctattagcctg

SEQ ID NO: 9604 - DNA, 33 bp, homo sapiens
tcttcaggactgctggkcatgttcaaagcaatg

SEQ ID NO: 9605 - DNA, 33 bp, homo sapiens
caaaagctgtaagtgcragagagaaaacacctc

SEQ ID NO: 9606 - DNA, 33 bp, homo sapiens
aactggtagatttgacyctgagctatctgggtt

SEQ ID NO: 9607 - DNA, 33 bp, homo sapiens
cagtgagacagcctctyacataagatggaaaga

SEQ ID NO: 9608 - DNA, 33 bp, homo sapiens
atgaaagagctatacawggaaaactatgaaaca

SEQ ID NO: 9609 - DNA, 33 bp, homo sapiens
acagcaaaaaagataastagaggcgaatatcac

SEQ ID NO: 9610 - DNA, 33 bp, homo sapiens
agcactttggacataaygaactgtcaataaatg

SEQ ID NO: 9611 - DNA, 33 bp, homo sapiens
tcccatccttgccttcrctttatgtacgagcca

SEQ ID NO: 9612 - DNA, 33 bp, homo sapiens
caatttccaggccataractctgatatcagaat

SEQ ID NO: 9613 - DNA, 33 bp, homo sapiens
gactgccttttgatacsatttacaggaactggc

SEQ ID NO: 9614 - DNA, 33 bp, homo sapiens
gctgcagggggaagatsagcagggatgagatat

SEQ ID NO: 9615 - DNA, 33 bp, homo sapiens
gatatttctgaaaacartgtcagatttttcacc

SEQ ID NO: 9616 - DNA, 33 bp, homo sapiens
gatctccctgctttcaractgactctttcagct

SEQ ID NO: 9617 - DNA, 33 bp, homo sapiens
aacaagaaagctgcacrattttatgaacaagat

SEQ ID NO: 9618 - DNA, 33 bp, homo sapiens
tggaagcacgtttagtyaaattcattgtctatt

SEQ ID NO: 9619 - DNA, 33 bp, homo sapiens
tatgtcttacatttaaygtcagttttccttcta

SEQ ID NO: 9620 - DNA, 33 bp, homo sapiens
tatgagaagtgaaataraatatatgagaagtca

SEQ ID NO: 9621 - DNA, 33 bp, homo sapiens
gctactttaaaagcaasggttagaagaataatt

SEQ ID NO: 9622 - DNA, 33 bp, homo sapiens
aaagacaataattgaawaacgtagaagtggtcc

SEQ ID NO: 9623 - DNA, 33 bp, homo sapiens
gggaacaccatatgaakacacaaagacaaagag

SEQ ID NO: 9624 - DNA, 33 bp, homo sapiens
gaactgggagtaccacyaggtagtcgacttggc

SEQ ID NO: 9625 - DNA, 33 bp, homo sapiens
ctcatttgaccctatcrccaaaggcagtcatat

SEQ ID NO: 9626 - DNA, 33 bp, homo sapiens
actttgtcccaagctayagtctgttcttagatt

SEQ ID NO: 9627 - DNA, 33 bp, homo sapiens
tgttcttagttgttcaratatccacattgaaat

SEQ ID NO: 9628 - DNA, 33 bp, homo sapiens
taagacttacaggacastaaaatgccagacata

SEQ ID NO: 9629 - DNA, 33 bp, homo sapiens
aagccagatacacgagrcaattatttaaattct

SEQ ID NO: 9630 - DNA, 33 bp, homo sapiens
gcaatgggtagaaataygctccaaactgcaaat

SEQ ID NO: 9631 - DNA, 33 bp, homo sapiens
tataatatgtagcgagraagtagatcaaggctc

SEQ ID NO: 9632 - DNA, 33 bp, homo sapiens
tcattttgaatatcacygcacaactatttttat

SEQ ID NO: 9633 - DNA, 33 bp, homo sapiens
tcatttctgtaggcaaytctgtcacactgttgt

SEQ ID NO: 9634 - DNA, 33 bp, homo sapiens
gagtgatggggattgcrccaaatgccaattcca

SEQ ID NO: 9635 - DNA, 33 bp, homo sapiens
gactggcaagagatagkaggacggctcatacta

SEQ ID NO: 9636 - DNA, 33 bp, homo sapiens
tatcagttgctgctctsaaattaaactgcagtg

SEQ ID NO: 9637 - DNA, 33 bp, homo sapiens
aactcaaaggtgacagraacaagttaaatcaat

SEQ ID NO: 9638 - DNA, 33 bp, homo sapiens
atcccattggttagtakgagatttaaacaagat

SEQ ID NO: 9639 - DNA, 33 bp, homo sapiens
gagctgagacaagatayatatgctactctcaga

SEQ ID NO: 9640 - DNA, 33 bp, homo sapiens
tttacaacgttgtccartcactgctactttcta

SEQ ID NO: 9641 - DNA, 33 bp, homo sapiens
ttcttgaatgaaaaatyactactcaataaaata

SEQ ID NO: 9642 - DNA, 33 bp, homo sapiens
aaagagctaaaaatcaycaaattaaggccagaa

SEQ ID NO: 9643 - DNA, 33 bp, homo sapiens
gactcccagaacctaaygtcaaccaatgttaat

SEQ ID NO: 9644 - DNA, 33 bp, homo sapiens
tggaatttacgtttagragaaattggctaaaac

SEQ ID NO: 9645 - DNA, 33 bp, homo sapiens
aaaaatctcatcccccwaaagtgttttaattaa

SEQ ID NO: 9646 - DNA, 33 bp, homo sapiens
tgtgatagagtatcggkagttataggtattgag

SEQ ID NO: 9647 - DNA, 33 bp, homo sapiens
agtagatactgggtagwcacaaagccacaagtg

SEQ ID NO: 9648 - DNA, 33 bp, homo sapiens
accttcttagtaccaaragtcaaagtttgagtt

SEQ ID NO: 9649 - DNA, 33 bp, homo sapiens
tcagcgtattattctcragatgattccttagct

SEQ ID NO: 9650 - DNA, 33 bp, homo sapiens
ccctttcagttttgtcrcatggtactggccaaa

SEQ ID NO: 9651 - DNA, 33 bp, homo sapiens
caaaactatcatgttgmaatatgaccttctttt

SEQ ID NO: 9652 - DNA, 33 bp, homo sapiens
agggtttgcgtaagacraaagagaaagagagag

SEQ ID NO: 9653 - DNA, 33 bp, homo sapiens
taagccccaagatatarccctcaagcatcagag

SEQ ID NO: 9654 - DNA, 33 bp, homo sapiens
aagcccgtctatggacwcaaaactggtgtgata

SEQ ID NO: 9655 - DNA, 33 bp, homo sapiens
attttgtcagccaataraacaccacttgggtgt

SEQ ID NO: 9656 - DNA, 33 bp, homo sapiens
tattatttaggtggctsaagtctcttacataaa

SEQ ID NO: 9657 - DNA, 33 bp, homo sapiens
ttgcttaaattcctccracatgcaaaatgacac

SEQ ID NO: 9658 - DNA, 33 bp, homo sapiens
tgttcttacaccattcyatcctcacacactatt

SEQ ID NO: 9659 - DNA, 33 bp, homo sapiens
caaagaaaagagatgamgttcgcaaggactggc

SEQ ID NO: 9660 - DNA, 33 bp, homo sapiens
atcaggaaaaataagaycgtatgttggtactaa

SEQ ID NO: 9661 - DNA, 33 bp, homo sapiens
tgtggttcaataacccrataggagtgtccagtt

SEQ ID NO: 9662 - DNA, 33 bp, homo sapiens
ttgagaatggagttagragaaaacaccacagag

SEQ ID NO: 9663 - DNA, 33 bp, homo sapiens
tggcctgctcttgtgaycctgagttagtctctg

SEQ ID NO: 9664 - DNA, 33 bp, homo sapiens
gtctacctggaaaagcrcctctgttcccagcag

SEQ ID NO: 9665 - DNA, 33 bp, homo sapiens
aactgtgaacccataawtgtcaaaatctaaaat

SEQ ID NO: 9666 - DNA, 33 bp, homo sapiens
cagctcagtacaaaccrggctcagtacaaacag

SEQ ID NO: 9667 - DNA, 33 bp, homo sapiens
cctcactgcagagacaktgccagaatttctgtg

SEQ ID NO: 9668 - DNA, 33 bp, homo sapiens
gggacaacaccgattcyagtaaatccactgtga

SEQ ID NO: 9669 - DNA, 33 bp, homo sapiens
tctccctgtccttccaygtgacgtctgcctcag

SEQ ID NO: 9670 - DNA, 33 bp, homo sapiens
tggatgctgtaacaaaragggtcagaaggctgt

SEQ ID NO: 9671 - DNA, 33 bp, homo sapiens
gtgagtttctctaagayatatacccaggagtga

SEQ ID NO: 9672 - DNA, 33 bp, homo sapiens
tccatttactcttggaycaatcccatccattag

SEQ ID NO: 9673 - DNA, 33 bp, homo sapiens
aaatggagtccctttcwagtcatatgtgtgcaa

SEQ ID NO: 9674 - DNA, 33 bp, homo sapiens
tccccctctctttcaakgtctcagtcatgccct

SEQ ID NO: 9675 - DNA, 33 bp, homo sapiens
atatgtgaaataaatasaaaatcatgaaggctt

SEQ ID NO: 9676 - DNA, 33 bp, homo sapiens
tggggtcacaatgttarggaaacagagttaggc

SEQ ID NO: 9677 - DNA, 33 bp, homo sapiens
attaccaagaccagcakggggtgagaggaaggc

SEQ ID NO: 9678 - DNA, 33 bp, homo sapiens
ggacagcctggacccaraagaattcactgttat

SEQ ID NO: 9679 - DNA, 33 bp, homo sapiens
tcacttattaacttcasaaccaatgactgtttc

SEQ ID NO: 9680 - DNA, 33 bp, homo sapiens
tgtggtatatcctgcartcctgaaagttttcta

SEQ ID NO: 9681 - DNA, 33 bp, homo sapiens
aatacaatggttgtaasaaaaacgcacacttaa

SEQ ID NO: 9682 - DNA, 33 bp, homo sapiens
atggcacagagaactcrgagactgctatattta

SEQ ID NO: 9683 - DNA, 33 bp, homo sapiens
ccattacttaacaacartgtgggagaagccaat

SEQ ID NO: 9684 - DNA, 33 bp, homo sapiens
ttcttactccactaccrgcatatcaataatacc

SEQ ID NO: 9685 - DNA, 33 bp, homo sapiens
gtgtggagagggttaaycgggcttcatttcttt

SEQ ID NO: 9686 - DNA, 33 bp, homo sapiens
gtttgcagaagaaggargcgtggtaacttggca

SEQ ID NO: 9687 - DNA, 33 bp, homo sapiens
ccatcgcagtaaacacrgcagaaaagcccacca

SEQ ID NO: 9688 - DNA, 33 bp, homo sapiens
tatttaaaagcagaaarctactataactggaac

SEQ ID NO: 9689 - DNA, 33 bp, homo sapiens
actctgcagtctgaagrataggatgctgtttaa

SEQ ID NO: 9690 - DNA, 33 bp, homo sapiens
ccttaaccgtcagtacyagagagttaagagtaa

SEQ ID NO: 9691 - DNA, 33 bp, homo sapiens
caacacctataattaaytgtaataccacagtaa

SEQ ID NO: 9692 - DNA, 33 bp, homo sapiens
gtccacaaaagcaaaawtcaacagctggaatta

SEQ ID NO: 9693 - DNA, 33 bp, homo sapiens
attagccacaaaaaaamcttgaagtaacgcatt

SEQ ID NO: 9694 - DNA, 33 bp, homo sapiens
aagtggttaacatctayctcgtagggataatgc

SEQ ID NO: 9695 - DNA, 33 bp, homo sapiens
agttcaattagtgttascagcatcccaagggca

SEQ ID NO: 9696 - DNA, 33 bp, homo sapiens
ctcttagatgaagtaayctttgtcttagtttaa

SEQ ID NO: 9697 - DNA, 33 bp, homo sapiens
agagatgagagctcagragaacagaacctgtaa

SEQ ID NO: 9698 - DNA, 33 bp, homo sapiens
attattttcatgataakaaagtgaagtgcattt

SEQ ID NO: 9699 - DNA, 33 bp, homo sapiens
agccgcgtctgggttgrattagtggctgttccc

SEQ ID NO: 9700 - DNA, 33 bp, homo sapiens
ctagcacccaccataayaaatatgctattcatg

SEQ ID NO: 9701 - DNA, 33 bp, homo sapiens
catgctggtaaacggcraacactctacagtgta

SEQ ID NO: 9702 - DNA, 33 bp, homo sapiens
atgatgaggcagtgtckcctatgtgtcacagca

SEQ ID NO: 9703 - DNA, 33 bp, homo sapiens
taagacaaaagtttggycacacatgatttcaaa

SEQ ID NO: 9704 - DNA, 33 bp, homo sapiens
tatataagttgaataamcatttgctacctaaaa

SEQ ID NO: 9705 - DNA, 33 bp, homo sapiens
ggcaggacatttgctaycatatgcacaatacta

SEQ ID NO: 9706 - DNA, 33 bp, homo sapiens
ggagagtggtgtataarcaggtgttgattaatg

SEQ ID NO: 9707 - DNA, 33 bp, homo sapiens
aaatgttttacgtgcawgggttcatcacaatga

SEQ ID NO: 9708 - DNA, 33 bp, homo sapiens
gtgtagtgggttaacawggtaggaacatttcta

SEQ ID NO: 9709 - DNA, 33 bp, homo sapiens
tatctggttctaaaaawcaaaagccaaatgtaa

SEQ ID NO: 9710 - DNA, 33 bp, homo sapiens
ttgccttctatttccaytaacttggactgccat

SEQ ID NO: 9711 - DNA, 33 bp, homo sapiens
tatctaaatataaagaycagtggaatgaaaata

SEQ ID NO: 9712 - DNA, 33 bp, homo sapiens
aatatagatgccattgycaaattaatataaaaa

SEQ ID NO: 9713 - DNA, 33 bp, homo sapiens
atactactgtggttgayagttttcaaaaagaaa

SEQ ID NO: 9714 - DNA, 33 bp, homo sapiens
tgttctgtagaagagaktcactaccattaggtg

SEQ ID NO: 9715 - DNA, 33 bp, homo sapiens
ttcctgtataatggacyctaaatgttatgatgt

SEQ ID NO: 9716 - DNA, 33 bp, homo sapiens
tattatcttggatttcraactcacacttatgaa

SEQ ID NO: 9717 - DNA, 33 bp, homo sapiens
gagagagttatctttcyagtatgatcaccatca

SEQ ID NO: 9718 - DNA, 33 bp, homo sapiens
ccttcctgcttcattayaagtgtgctaaattgg

SEQ ID NO: 9719 - DNA, 33 bp, homo sapiens
catattctctaagaaawtgacttgccctgctaa

SEQ ID NO: 9720 - DNA, 33 bp, homo sapiens
gacattatcatacacamgaccaaaccacaagct

SEQ ID NO: 9721 - DNA, 33 bp, homo sapiens
aagcataggagatatamggataaccaaagaaaa

SEQ ID NO: 9722 - DNA, 33 bp, homo sapiens
atacatcaactatgaaragcagcacctgtactt

SEQ ID NO: 9723 - DNA, 33 bp, homo sapiens
actgaacaattgtgcaracaagaggagtgagcc

SEQ ID NO: 9724 - DNA, 33 bp, homo sapiens
ctgatgaagaagaccaygatgatgataattgtg

SEQ ID NO: 9725 - DNA, 33 bp, homo sapiens
ctgaatctttcttacarcatctgggacaaatcc

SEQ ID NO: 9726 - DNA, 33 bp, homo sapiens
tctttcgatacactcaytaattttagcatggga

SEQ ID NO: 9727 - DNA, 33 bp, homo sapiens
acttctatatttgagamcttgtgagcaaactgt

SEQ ID NO: 9728 - DNA, 33 bp, homo sapiens
tttagcttgtctccacygaacaaaacaacacaa

SEQ ID NO: 9729 - DNA, 33 bp, homo sapiens
agaggtggagaggaaargtggtcaccgcgagat

SEQ ID NO: 9730 - DNA, 33 bp, homo sapiens
tgacatttgtgatgaamtctgtaaattaagaaa

SEQ ID NO: 9731 - DNA, 33 bp, homo sapiens
catgttttagaaaaaaygttcaaacaagtagat

SEQ ID NO: 9732 - DNA, 33 bp, homo sapiens
tttgttctttctcctayctaattactcttgcta

SEQ ID NO: 9733 - DNA, 33 bp, homo sapiens
cttcttgatcgttggaraaaaagattggccctt

SEQ ID NO: 9734 - DNA, 33 bp, homo sapiens
ctcaaggctctagaacmagtaatgctatttgac

SEQ ID NO: 9735 - DNA, 33 bp, homo sapiens
agagaagctaagcttgraaactcagtcatgcaa

SEQ ID NO: 9736 - DNA, 33 bp, homo sapiens
gtttctgtaactctacyctgtgaataatacagc

SEQ ID NO: 9737 - DNA, 33 bp, homo sapiens
gacaggaaatctagackgcacttcaaacagata

SEQ ID NO: 9738 - DNA, 33 bp, homo sapiens
ttcatgattcctgtaaygcaggtgtagtgatga

SEQ ID NO: 9739 - DNA, 33 bp, homo sapiens
gagccttaattaatacyctgtggcacttttcac

SEQ ID NO: 9740 - DNA, 33 bp, homo sapiens
aatgagaacctagaacygagagtcaaaaggaca

SEQ ID NO: 9741 - DNA, 33 bp, homo sapiens
aggtacattgtgttccrgatttgactattggaa

SEQ ID NO: 9742 - DNA, 33 bp, homo sapiens
gacccggctgcttctaytaacggtactgtgtga

SEQ ID NO: 9743 - DNA, 33 bp, homo sapiens
gtaagtgggtatctgcyaatcctgacatctgtc

SEQ ID NO: 9744 - DNA, 33 bp, homo sapiens
agcgcatgtaaggctayagttgtcagccaggat

SEQ ID NO: 9745 - DNA, 33 bp, homo sapiens
tcattcatttgtacacyaagtcttttttgaatg

SEQ ID NO: 9746 - DNA, 33 bp, homo sapiens
tgatggtgaaaccaccsgcactgatgatgcatc

SEQ ID NO: 9747 - DNA, 33 bp, homo sapiens
ccaggttagaattagayggctcacagacaggcc

SEQ ID NO: 9748 - DNA, 33 bp, homo sapiens
gtcctgcactctggggyaggcccattgcctctt

SEQ ID NO: 9749 - DNA, 33 bp, homo sapiens
ccaggagtgttgctcaygttactcccttaggcc

SEQ ID NO: 9750 - DNA, 33 bp, homo sapiens
ttgacaaaaggagtgaygggcagaattgcctgg

SEQ ID NO: 9751 - DNA, 33 bp, homo sapiens
tggttttgtgtaagagycaggcttccagaaccc

SEQ ID NO: 9752 - DNA, 33 bp, homo sapiens
tgaggagaggagagggwagaatgaagaggactt

SEQ ID NO: 9753 - DNA, 33 bp, homo sapiens
cattttaatttctgcayatcatgtgaagttaga

SEQ ID NO: 9754 - DNA, 33 bp, homo sapiens
gttcagacattcccacyggcccttgcagccaca

SEQ ID NO: 9755 - DNA, 33 bp, homo sapiens
aataagatgagaaaagmacatggaggctgcagc

SEQ ID NO: 9756 - DNA, 33 bp, homo sapiens
cagccacctgcttgggkatcagtccacccacat

SEQ ID NO: 9757 - DNA, 33 bp, homo sapiens
ggtcactgctgactacsacttcctcattctcta

SEQ ID NO: 9758 - DNA, 33 bp, homo sapiens
tttgcctcctctcctcyatatcaggtgatccag

SEQ ID NO: 9759 - DNA, 33 bp, homo sapiens
aaatggagaagtttaaytgccctccaagacaaa

SEQ ID NO: 9760 - DNA, 33 bp, homo sapiens
ggtaagtggggccagamcaggttcccagagggc

SEQ ID NO: 9761 - DNA, 33 bp, homo sapiens
atttacaccttctctayatgatcagccaatgtt

SEQ ID NO: 9762 - DNA, 33 bp, homo sapiens
gcagagccaggtgtacrgagcataacatgaatg

SEQ ID NO: 9763 - DNA, 33 bp, homo sapiens
accataatcattttaaragtggaaacaggctca

SEQ ID NO: 9764 - DNA, 33 bp, homo sapiens
cagtttggctatttccrctgccggggaggccac

SEQ ID NO: 9765 - DNA, 33 bp, homo sapiens
aagacatgacaggaacragatccgaggccacgt

SEQ ID NO: 9766 - DNA, 33 bp, homo sapiens
tggaaggaataaggagmagcactagatgagggc

SEQ ID NO: 9767 - DNA, 33 bp, homo sapiens
cagtcccagcaaccackaatccacgttctggct

SEQ ID NO: 9768 - DNA, 33 bp, homo sapiens
tgactatagcacaaacmatgtgaccattctcct

SEQ ID NO: 9769 - DNA, 33 bp, homo sapiens
attttcatgtcagctgraggggtcggtcacgtg

SEQ ID NO: 9770 - DNA, 33 bp, homo sapiens
ttgcccaagaggaagaygacaggaaaggtgggg

SEQ ID NO: 9771 - DNA, 33 bp, homo sapiens
taggagctggactgaaratactggcagacatac

SEQ ID NO: 9772 - DNA, 33 bp, homo sapiens
cttcctcttctcttgcracctttattgacccta

SEQ ID NO: 9773 - DNA, 33 bp, homo sapiens
gcaccctagagaggcastaagagcagccccctg

SEQ ID NO: 9774 - DNA, 33 bp, homo sapiens
agcctcaaaacacaagmctgtcaggacaagttt

SEQ ID NO: 9775 - DNA, 33 bp, homo sapiens
taaaataagacaattamatttgccacatcaatc

SEQ ID NO: 9776 - DNA, 33 bp, homo sapiens
ttgcgcctgtatgctcrcgtagtccctgctact

SEQ ID NO: 9777 - DNA, 33 bp, homo sapiens
tgctcactgtctagtamgggaaagagatacgaa

SEQ ID NO: 9778 - DNA, 33 bp, homo sapiens
attcactaaaatatacmctgaagaaagtcatac

SEQ ID NO: 9779 - DNA, 33 bp, homo sapiens
ctaacttgtcgtttaaycttgagcaggccacac

SEQ ID NO: 9780 - DNA, 33 bp, homo sapiens
ggtcctggggctctaamggtagtaggggctcta

SEQ ID NO: 9781 - DNA, 33 bp, homo sapiens
tgacttatcttttgcaractttttttgatcaaa

SEQ ID NO: 9782 - DNA, 33 bp, homo sapiens
gtgaaatgcctgttcaygtctttcaatcatttt

SEQ ID NO: 9783 - DNA, 33 bp, homo sapiens
aggagtaaaatcctagyacaaatttacagagtt

SEQ ID NO: 9784 - DNA, 33 bp, homo sapiens
ggtgccacacttaccawccctcagggatcaact

SEQ ID NO: 9785 - DNA, 33 bp, homo sapiens
gaccaaaggctcctccrcttcctgcaggtgttc

SEQ ID NO: 9786 - DNA, 33 bp, homo sapiens
catctgtaagacaaggyccctggcagtccacac

SEQ ID NO: 9787 - DNA, 33 bp, homo sapiens
gaatctgtcatttcacrgcaaactgacagtatt

SEQ ID NO: 9788 - DNA, 33 bp, homo sapiens
tggcactcaggtgtaasaaatgccacgtcttta

SEQ ID NO: 9789 - DNA, 33 bp, homo sapiens
aaatctatatttacagyccaggcctctccctaa

SEQ ID NO: 9790 - DNA, 33 bp, homo sapiens
catcacagacgctccasccttgtgaactcatgt

SEQ ID NO: 9791 - DNA, 33 bp, homo sapiens
ggacttcccaggctccygaagtgtaataagtaa

SEQ ID NO: 9792 - DNA, 33 bp, homo sapiens
agggactctagagtctwagaaatgccctaacct

SEQ ID NO: 9793 - DNA, 33 bp, homo sapiens
caacccctgctggaaawccaacctgtttccctt

SEQ ID NO: 9794 - DNA, 33 bp, homo sapiens
aggggtgtgacatcgcrgaagggaagacaagtt

SEQ ID NO: 9795 - DNA, 33 bp, homo sapiens
cagaattgaactgaacrcaaggatacccagctg

SEQ ID NO: 9796 - DNA, 33 bp, homo sapiens
aagcagatcaagttcaytcatgtccagaagcag

SEQ ID NO: 9797 - DNA, 33 bp, homo sapiens
atagcattgaaattcawatccctgtaaatataa

SEQ ID NO: 9798 - DNA, 33 bp, homo sapiens
ttagggaagagccaacrgtggatggactcgaac

SEQ ID NO: 9799 - DNA, 33 bp, homo sapiens
tgtggtaattaggaaaraggacaagttccctct

SEQ ID NO: 9800 - DNA, 33 bp, homo sapiens
aaatgtgctagtttcaygcttctgtatttttaa

SEQ ID NO: 9801 - DNA, 33 bp, homo sapiens
aagtacctttagtcaargtagttcagtgatttc

SEQ ID NO: 9802 - DNA, 33 bp, homo sapiens
acagactaatgggaaargcagatacattaacca

SEQ ID NO: 9803 - DNA, 33 bp, homo sapiens
tgagtattgacaaggaratctttgataattggg

SEQ ID NO: 9804 - DNA, 33 bp, homo sapiens
agaaacgtatggggagkatgaatatgagttttc

SEQ ID NO: 9805 - DNA, 33 bp, homo sapiens
ccctcggtcacctaacyggaaactccaggggta

SEQ ID NO: 9806 - DNA, 33 bp, homo sapiens
gagatcatggaagacaytggatactatgtttag

SEQ ID NO: 9807 - DNA, 33 bp, homo sapiens
gtctcccatgcttgagwaatcagttgtcctcag

SEQ ID NO: 9808 - DNA, 33 bp, homo sapiens
ttgtggtaactgtccaragatagctgcctagtg

SEQ ID NO: 9809 - DNA, 33 bp, homo sapiens
ggcatcctctggagtayctgcgacaatatcctc

SEQ ID NO: 9810 - DNA, 33 bp, homo sapiens
ttgtagactatgagccrctgttctaaatatctt

SEQ ID NO: 9811 - DNA, 33 bp, homo sapiens
ccacagctcataactartacagcccgcatctaa

SEQ ID NO: 9812 - DNA, 33 bp, homo sapiens
taggctaagtcccacaytaaacagaggaccccc

SEQ ID NO: 9813 - DNA, 33 bp, homo sapiens
tcatccatttaggataygggggaattcagtgta

SEQ ID NO: 9814 - DNA, 33 bp, homo sapiens
taggaaatcttgtgcaygcctggatcttgggca

SEQ ID NO: 9815 - DNA, 33 bp, homo sapiens
ggtaagtactcacatartagactcaatttcacc

SEQ ID NO: 9816 - DNA, 33 bp, homo sapiens
tcacacttttaatgacrctgcctcttatgtaaa

SEQ ID NO: 9817 - DNA, 33 bp, homo sapiens
aggcaggtgtgtttcaygcgttgactcttacgt

SEQ ID NO: 9818 - DNA, 33 bp, homo sapiens
tcagagtgtcaaagaargaagccatagggatgg

SEQ ID NO: 9819 - DNA, 33 bp, homo sapiens
agtttaggcaaggaatragggttgtccaatgac

SEQ ID NO: 9820 - DNA, 33 bp, homo sapiens
acaagatatttcaatgycaatagaagaaagagc

SEQ ID NO: 9821 - DNA, 33 bp, homo sapiens
atcccctctacattacyctcaagcactgctctc

SEQ ID NO: 9822 - DNA, 33 bp, homo sapiens
ggattcattggatttgraggggatctagctgaa

SEQ ID NO: 9823 - DNA, 33 bp, homo sapiens
ctcctgtacttaactakctatgcaacctttaac

SEQ ID NO: 9824 - DNA, 33 bp, homo sapiens
caggggaagaaattacrgtaatgaatataaccc

SEQ ID NO: 9825 - DNA, 33 bp, homo sapiens
ctcctttcagttgtcartacagaggattttcac

SEQ ID NO: 9826 - DNA, 33 bp, homo sapiens
ataggatgtgtaattcratcacgttctgtttag

SEQ ID NO: 9827 - DNA, 33 bp, homo sapiens
atcattagtcatttcartcacaaatacctgtca

SEQ ID NO: 9828 - DNA, 33 bp, homo sapiens
cgtagtgaggagaaacrgggttgggacatgctt

SEQ ID NO: 9829 - DNA, 33 bp, homo sapiens
gactactacttggaaaytgcgttttattttcaa

SEQ ID NO: 9830 - DNA, 33 bp, homo sapiens
agaccaatagagatcaygggtagcaataataca

SEQ ID NO: 9831 - DNA, 33 bp, homo sapiens
gaagacacagtagaaartcactctgtctttggc

SEQ ID NO: 9832 - DNA, 33 bp, homo sapiens
aatgtatcagctacatsaaggccagagcacagt

SEQ ID NO: 9833 - DNA, 33 bp, homo sapiens
gtatttgagaaagatarccccctgatcctgata

SEQ ID NO: 9834 - DNA, 33 bp, homo sapiens
tggtggggtggcgaaayggactcttttagattt

SEQ ID NO: 9835 - DNA, 33 bp, homo sapiens
tagcaggcataaaaacrattttaaccttcttat

SEQ ID NO: 9836 - DNA, 33 bp, homo sapiens
agcctaaggaaaatackaatggttcagctcttc

SEQ ID NO: 9837 - DNA, 33 bp, homo sapiens
cttcgaaacaaaaccaygttaggtcaatttcct

SEQ ID NO: 9838 - DNA, 33 bp, homo sapiens
actaaacaggaagcccraaaatacatccttgta

SEQ ID NO: 9839 - DNA, 33 bp, homo sapiens
gggctttgtatagttgsaaaattatttcactgc

SEQ ID NO: 9840 - DNA, 33 bp, homo sapiens
gtaattctttacaacayagtagaaagcatagaa

SEQ ID NO: 9841 - DNA, 33 bp, homo sapiens
tttcttatcacataaamcattatgccatgatct

SEQ ID NO: 9842 - DNA, 33 bp, homo sapiens
aaaatgtcagatttccygatgactagaccactg

SEQ ID NO: 9843 - DNA, 33 bp, homo sapiens
tctatattcagtaatastaccaaattaaagact

SEQ ID NO: 9844 - DNA, 33 bp, homo sapiens
actcttcatagctaacrggtctcccattaaata

SEQ ID NO: 9845 - DNA, 33 bp, homo sapiens
gtctcctttactctagractttcgtatattgga

SEQ ID NO: 9846 - DNA, 33 bp, homo sapiens
caagcacaaaagaataycagcccttgaatgaga

SEQ ID NO: 9847 - DNA, 33 bp, homo sapiens
gccccagtcatctaaaycagaaacctggaagtc

SEQ ID NO: 9848 - DNA, 33 bp, homo sapiens
atgttcacaaaatccargtttgctcttgggact

SEQ ID NO: 9849 - DNA, 33 bp, homo sapiens
ctctctgtcccacaaasttaggtaccactcgaa

SEQ ID NO: 9850 - DNA, 33 bp, homo sapiens
tgacctttgtctgaaaygctggacaaaatttca

SEQ ID NO: 9851 - DNA, 33 bp, homo sapiens
gaaagttgttactgtayatttgggccactactt

SEQ ID NO: 9852 - DNA, 33 bp, homo sapiens
tgtttcctgatttctgscaacaacactcttttc

SEQ ID NO: 9853 - DNA, 33 bp, homo sapiens
aatagatatgattctasagaggaactttttgtt

SEQ ID NO: 9854 - DNA, 33 bp, homo sapiens
taggggcacctatagasaagctacacaagctat

SEQ ID NO: 9855 - DNA, 33 bp, homo sapiens
cttcaaccccaatttawatcattaggctgattc

SEQ ID NO: 9856 - DNA, 33 bp, homo sapiens
ttgaaaaatgatggcayagtaaattataaagca

SEQ ID NO: 9857 - DNA, 33 bp, homo sapiens
gagatagatatcatacmaaagaaccaaacagaa

SEQ ID NO: 9858 - DNA, 33 bp, homo sapiens
aaaccaagctgatttcyacccaatagcccttga

SEQ ID NO: 9859 - DNA, 33 bp, homo sapiens
ttgtctctaggtttgaygggaaatttaaggctg

SEQ ID NO: 9860 - DNA, 33 bp, homo sapiens
acatctatgggttccaytgctttaacaaaactc

SEQ ID NO: 9861 - DNA, 33 bp, homo sapiens
gaggagtaacacaggayattcaaaataaaacta

SEQ ID NO: 9862 - DNA, 33 bp, homo sapiens
ctcatatatgcaccackattttatgctatacaa

SEQ ID NO: 9863 - DNA, 33 bp, homo sapiens
tttggatgaggtcaaakaagtcctctttagaag

SEQ ID NO: 9864 - DNA, 33 bp, homo sapiens
tcacccgtgatccatgracaaattggtggacaa

SEQ ID NO: 9865 - DNA, 33 bp, homo sapiens
ctattgagtccttaatmaactactgagttgtat

SEQ ID NO: 9866 - DNA, 33 bp, homo sapiens
ctgttagctaccaggtwaaaaaggatgtataga

SEQ ID NO: 9867 - DNA, 33 bp, homo sapiens
caagctgccttccaaarccatttcatcagaagg

SEQ ID NO: 9868 - DNA, 33 bp, homo sapiens
aatttagtaaacttgaraatccttctagaattg

SEQ ID NO: 9869 - DNA, 33 bp, homo sapiens
tagaagctgaggagaaytgataacacaagaaga

SEQ ID NO: 9870 - DNA, 33 bp, homo sapiens
ctggcaatagagagaargatggcagaattttgc

SEQ ID NO: 9871 - DNA, 33 bp, homo sapiens
tagttgttaatgctgaygtaattgtttcctgct

SEQ ID NO: 9872 - DNA, 33 bp, homo sapiens
taatgaccaaccacagratgtacttcatgcttt

SEQ ID NO: 9873 - DNA, 33 bp, homo sapiens
ggaaaagcagacctaaragaaatcaagagtcag

SEQ ID NO: 9874 - DNA, 33 bp, homo sapiens
agtcagggtgtggtcamcttgccctgccgttaa

SEQ ID NO: 9875 - DNA, 33 bp, homo sapiens
agatcattttctagacyaagggctgcagaagaa

SEQ ID NO: 9876 - DNA, 33 bp, homo sapiens
gatcaggatacaaagayactaagctgtaaatga

SEQ ID NO: 9877 - DNA, 33 bp, homo sapiens
ttaaataaaacttccartataatgaccaaaaaa

SEQ ID NO: 9878 - DNA, 33 bp, homo sapiens
tctctgagatgaaagarggcttagaaatgtgtt

SEQ ID NO: 9879 - DNA, 33 bp, homo sapiens
tcctcaagaactcttawgttgttgcttctcaac

SEQ ID NO: 9880 - DNA, 33 bp, homo sapiens
tcagttacttatctgakgtaattttcaccacta

SEQ ID NO: 9881 - DNA, 33 bp, homo sapiens
atgttaaaaaggccaarttcctcagttgtagcc

SEQ ID NO: 9882 - DNA, 33 bp, homo sapiens
tgccacctattagcctraaggtcaacctatatg

SEQ ID NO: 9883 - DNA, 33 bp, homo sapiens
tcttaataaccaaaagsattactggttcttttt

SEQ ID NO: 9884 - DNA, 33 bp, homo sapiens
ctttataatgttgcacwagacaaagggactcac

SEQ ID NO: 9885 - DNA, 33 bp, homo sapiens
tataaacattacctaastatgccagacaagagt

SEQ ID NO: 9886 - DNA, 33 bp, homo sapiens
acttttgaatgaagtcractctcttccagtctt

SEQ ID NO: 9887 - DNA, 33 bp, homo sapiens
atgatctgaaaaactcycttcactcattcatta

SEQ ID NO: 9888 - DNA, 33 bp, homo sapiens
agcctctcaaagaaacraccacttctgtgcgct

SEQ ID NO: 9889 - DNA, 33 bp, homo sapiens
tctgtaccttacttgcraatgcttcaacagtgt

SEQ ID NO: 9890 - DNA, 33 bp, homo sapiens
gacttataaatgataamtagcagatggaggagg

SEQ ID NO: 9891 - DNA, 33 bp, homo sapiens
actaatgtaagagaaamtgagttaggaggaaag

SEQ ID NO: 9892 - DNA, 33 bp, homo sapiens
ttgttgattacatttayactgcgaattgttatt

SEQ ID NO: 9893 - DNA, 33 bp, homo sapiens
aaataataaatgctacyggcaaactatacaact

SEQ ID NO: 9894 - DNA, 33 bp, homo sapiens
atttcctttaattttayggctcatgattcaagc

SEQ ID NO: 9895 - DNA, 33 bp, homo sapiens
ttcagtgttccagaaaycattgtttacaccacc

SEQ ID NO: 9896 - DNA, 33 bp, homo sapiens
caataatttaagcatcrctcagcacaccatttc

SEQ ID NO: 9897 - DNA, 33 bp, homo sapiens
gtggatgtgtttgtggkatagcattattattcc

SEQ ID NO: 9898 - DNA, 33 bp, homo sapiens
cttcactgtaaaacccracactatgaaaacctt

SEQ ID NO: 9899 - DNA, 33 bp, homo sapiens
ggcttgacatttgtaayctcagactcaaaactc

SEQ ID NO: 9900 - DNA, 33 bp, homo sapiens
ctctccttttactcaastcatattcatggcatt

SEQ ID NO: 9901 - DNA, 33 bp, homo sapiens
gctaaggaagcaagtawaatctcagataccact

SEQ ID NO: 9902 - DNA, 33 bp, homo sapiens
ccataatctatttggcyagaaaggttgattcat

SEQ ID NO: 9903 - DNA, 33 bp, homo sapiens
gtttttgtttgttgaamtataagatggtggaga

SEQ ID NO: 9904 - DNA, 33 bp, homo sapiens
ggaccactctttaagayagattgaactggaaca

SEQ ID NO: 9905 - DNA, 33 bp, homo sapiens
acatggtgagcttttayagcctgtaatatacta

SEQ ID NO: 9906 - DNA, 33 bp, homo sapiens
aattgctgtaaataggrattaggatccaattac

SEQ ID NO: 9907 - DNA, 33 bp, homo sapiens
acctgacactgggtaaytcgtaaagaaaagagg

SEQ ID NO: 9908 - DNA, 33 bp, homo sapiens
agttgttattagctacrgaaaacatcacaaaat

SEQ ID NO: 9909 - DNA, 33 bp, homo sapiens
atgcagtgttaagttaygctgtggaggaagaac

SEQ ID NO: 9910 - DNA, 33 bp, homo sapiens
caaacatttctgcaccraccctgattcagttga

SEQ ID NO: 9911 - DNA, 33 bp, homo sapiens
ataagagttcattcaayaaacgagtgcaagttt

SEQ ID NO: 9912 - DNA, 33 bp, homo sapiens
gttttcttgaagctaakgaggaaactttatcta

SEQ ID NO: 9913 - DNA, 33 bp, homo sapiens
ggaaagctaatggaacragattacaagactgtg

SEQ ID NO: 9914 - DNA, 33 bp, homo sapiens
gttcttcattgccccaytgcgtattttcccaac

SEQ ID NO: 9915 - DNA, 33 bp, homo sapiens
aacagaaaggaagagaygcattgtttcatgaaa

SEQ ID NO: 9916 - DNA, 33 bp, homo sapiens
aacaatacccagttgarcaggaagcaagcaaag

SEQ ID NO: 9917 - DNA, 33 bp, homo sapiens
tgatgggaggccatagwagaataggttttcaac

SEQ ID NO: 9918 - DNA, 33 bp, homo sapiens
cttcctaagccattgakgaaggagaagaataaa

SEQ ID NO: 9919 - DNA, 33 bp, homo sapiens
tggcttctgccaaagtractgagacaagaaacc

SEQ ID NO: 9920 - DNA, 33 bp, homo sapiens
cagtattgcataattcwaataacagcagttact

SEQ ID NO: 9921 - DNA, 33 bp, homo sapiens
agataatctctattccscctggacaccagctca

SEQ ID NO: 9922 - DNA, 33 bp, homo sapiens
cagtgtcccaaatggawctctattattcactca

SEQ ID NO: 9923 - DNA, 33 bp, homo sapiens
caacatcttcatcgtcwctactatcagaatcac

SEQ ID NO: 9924 - DNA, 33 bp, homo sapiens
cgttcataaatttcacyaagtcatcaacacaaa

SEQ ID NO: 9925 - DNA, 33 bp, homo sapiens
ttcccaacagcataacragtgtaattttatggg

SEQ ID NO: 9926 - DNA, 33 bp, homo sapiens
aacactgattatgtgayggcatagcatgaaaac

SEQ ID NO: 9927 - DNA, 33 bp, homo sapiens
tcattaagtttaccagmcatacaatcaagaatc

SEQ ID NO: 9928 - DNA, 33 bp, homo sapiens
ttagtctagtattaacmctaccaaagactacat

SEQ ID NO: 9929 - DNA, 33 bp, homo sapiens
gctgtcctacaagaaaygctgaacagattttgt

SEQ ID NO: 9930 - DNA, 33 bp, homo sapiens
tatgggtgtgtataaarttgtaagaatctaata

SEQ ID NO: 9931 - DNA, 33 bp, homo sapiens
cactctaaactactcamaaagaaacacacagac

SEQ ID NO: 9932 - DNA, 33 bp, homo sapiens
aatccctttctacatayaaaactagactgcatt

SEQ ID NO: 9933 - DNA, 33 bp, homo sapiens
agagaccgtaacataakcactgttttcacccga

SEQ ID NO: 9934 - DNA, 33 bp, homo sapiens
ttaaaattattataggycagaagttttcatgtg

SEQ ID NO: 9935 - DNA, 33 bp, homo sapiens
ccctgagcagtcttcaragattttcacatgaga

SEQ ID NO: 9936 - DNA, 33 bp, homo sapiens
tttgtaataccagtcaracgaaacagttttctc

SEQ ID NO: 9937 - DNA, 33 bp, homo sapiens
cattgccatctaaactyaaactcatacgaattc

SEQ ID NO: 9938 - DNA, 33 bp, homo sapiens
agaacaggactgtggasgcactgagattttctg

SEQ ID NO: 9939 - DNA, 33 bp, homo sapiens
accctctaatttcccarctcttctccttattga

SEQ ID NO: 9940 - DNA, 33 bp, homo sapiens
gagtccaggaagcaaakaatttgtttatgcctt

SEQ ID NO: 9941 - DNA, 33 bp, homo sapiens
tatatataaaaagcacmgtgagaagtactttgt

SEQ ID NO: 9942 - DNA, 33 bp, homo sapiens
ttatggtgtgcattcartaacagctagggcttt

SEQ ID NO: 9943 - DNA, 33 bp, homo sapiens
taaagccattttagtasgtagcatacataacaa

SEQ ID NO: 9944 - DNA, 33 bp, homo sapiens
gaagtgagctgacagarcttttgtaagatgaca

SEQ ID NO: 9945 - DNA, 33 bp, homo sapiens
gatacatgagaaagaawggattcggcaaattac

SEQ ID NO: 9946 - DNA, 33 bp, homo sapiens
attccctcttggtcaaygtacactttccctcag

SEQ ID NO: 9947 - DNA, 33 bp, homo sapiens
atcataggcacatgaamgcaaaatgtactggtg

SEQ ID NO: 9948 - DNA, 33 bp, homo sapiens
atagacaagaaggatasgagaatcaccactcca

SEQ ID NO: 9949 - DNA, 33 bp, homo sapiens
ttcatcccaatcaccasagtagtttgctaatga

SEQ ID NO: 9950 - DNA, 33 bp, homo sapiens
atttacaatatacagcrgaagtagaagtgacta

SEQ ID NO: 9951 - DNA, 33 bp, homo sapiens
ttggagaatatcttaaygaccttggagtggagc

SEQ ID NO: 9952 - DNA, 33 bp, homo sapiens
gttttcttgtccttccracctcaggatctttgc

SEQ ID NO: 9953 - DNA, 33 bp, homo sapiens
aaaagggacaaatcaarttcttggtgtagggca

SEQ ID NO: 9954 - DNA, 33 bp, homo sapiens
ctcgtggtactaaaaaygcacacaaatatcaca

SEQ ID NO: 9955 - DNA, 33 bp, homo sapiens
gcaaaaaggtgaaaacragggcaagactatgta

SEQ ID NO: 9956 - DNA, 33 bp, homo sapiens
ttcagtgttcttgttgwaatttagcaatcaaaa

SEQ ID NO: 9957 - DNA, 33 bp, homo sapiens
gctggcaggctgagaaragaaggtggaagacag

SEQ ID NO: 9958 - DNA, 33 bp, homo sapiens
ccactgctttgggacastgattctcttactctt

SEQ ID NO: 9959 - DNA, 33 bp, homo sapiens
ctggtgacattcagtargtgatgtagtctattt

SEQ ID NO: 9960 - DNA, 33 bp, homo sapiens
ctgctggtgtttatggycagtttttaagtatat

SEQ ID NO: 9961 - DNA, 33 bp, homo sapiens
actgactcctagaatcratgtgttgcggatgtt

SEQ ID NO: 9962 - DNA, 33 bp, homo sapiens
tatcgccaaggctcgamgttcagtactcttgtc

SEQ ID NO: 9963 - DNA, 33 bp, homo sapiens
ggccgagaagagtcaaygggcctatcgcaaact

SEQ ID NO: 9964 - DNA, 33 bp, homo sapiens
ttgctctttgtcctcargttgggtatgaaatgc

SEQ ID NO: 9965 - DNA, 33 bp, homo sapiens
aaaagaagacctttaasgctcaacaacatgcat

SEQ ID NO: 9966 - DNA, 33 bp, homo sapiens
ttgtaacctttttcacygtagagattagaatcc

SEQ ID NO: 9967 - DNA, 33 bp, homo sapiens
agtagaaacagtatgcygaggcaatctaggtaa

SEQ ID NO: 9968 - DNA, 33 bp, homo sapiens
aagtttggaattttccrgagacttgttcaatgg

SEQ ID NO: 9969 - DNA, 33 bp, homo sapiens
tcacacccacattccascagagttctaccacaa

SEQ ID NO: 9970 - DNA, 33 bp, homo sapiens
catgtctgaaaattcaygtattctggatcaagc

SEQ ID NO: 9971 - DNA, 33 bp, homo sapiens
tggcaaaagatactgarcaaagccaaaaccaaa

SEQ ID NO: 9972 - DNA, 33 bp, homo sapiens
gacatcttgattgcaamcttgtataatactaac

SEQ ID NO: 9973 - DNA, 33 bp, homo sapiens
tgttcacagaggtatgyactgcaatgtcttctt

SEQ ID NO: 9974 - DNA, 33 bp, homo sapiens
tcttctacctgggaacyatactcctcactcagt

SEQ ID NO: 9975 - DNA, 33 bp, homo sapiens
tctgtcttgacatgggkccatatcagcaattaa

SEQ ID NO: 9976 - DNA, 33 bp, homo sapiens
cttttcaaccttagcakgttaaggctctgtctt

SEQ ID NO: 9977 - DNA, 33 bp, homo sapiens
taacaggttctgagtasaaacatagctcaatga

SEQ ID NO: 9978 - DNA, 33 bp, homo sapiens
cactgacattgtagaaytgaagacttcctagaa

SEQ ID NO: 9979 - DNA, 33 bp, homo sapiens
tctgaaaagaaaaagtraataggtgagccagat

SEQ ID NO: 9980 - DNA, 33 bp, homo sapiens
aggcatgtatccccaaragttcttcagatcaaa

SEQ ID NO: 9981 - DNA, 33 bp, homo sapiens
taagtagcatttgtagscaaagtcctaaaaaag

SEQ ID NO: 9982 - DNA, 33 bp, homo sapiens
aagggtaaaagatctcyacaagcagaactacaa

SEQ ID NO: 9983 - DNA, 33 bp, homo sapiens
aatttaattggctgccyatcagatgacctcctt

SEQ ID NO: 9984 - DNA, 33 bp, homo sapiens
ctgagcaactggctaamctctatctgcacccgg

SEQ ID NO: 9985 - DNA, 33 bp, homo sapiens
taattgtgatttccagyctaattctcagcatcc

SEQ ID NO: 9986 - DNA, 33 bp, homo sapiens
gtgatgtctttactagycatgttaagttgcaga

SEQ ID NO: 9987 - DNA, 33 bp, homo sapiens
aaactacacttccccartccattgcagtgagga

SEQ ID NO: 9988 - DNA, 33 bp, homo sapiens
ctacacagagaaataarctctcatcagagtgaa

SEQ ID NO: 9989 - DNA, 33 bp, homo sapiens
agaccagagctgattaygggaaagtagttagct

SEQ ID NO: 9990 - DNA, 33 bp, homo sapiens
aaatattaggtttgctwaataccttaaggtcat

SEQ ID NO: 9991 - DNA, 33 bp, homo sapiens
tgtaatttccatgtaamcattcccctcccttct

SEQ ID NO: 9992 - DNA, 33 bp, homo sapiens
ctagaattcatagtgcraagtcccaaaaaggag

SEQ ID NO: 9993 - DNA, 33 bp, homo sapiens
ttgagtgaacactgtaygcaaggtggtctatta

SEQ ID NO: 9994 - DNA, 33 bp, homo sapiens
gaattccaactgattaygttcttgctaatactt

SEQ ID NO: 9995 - DNA, 33 bp, homo sapiens
atgtgtttatgctctaygaggcaacatttagta

SEQ ID NO: 9996 - DNA, 33 bp, homo sapiens
ccaataaaccagttagrcaaaatgcttactaca

SEQ ID NO: 9997 - DNA, 33 bp, homo sapiens
cggcttcttagctttaygatggcaacaagtatg

SEQ ID NO: 9998 - DNA, 33 bp, homo sapiens
gagtctcttatgaggcmgatttggtttgaaaac

SEQ ID NO: 9999 - DNA, 33 bp, homo sapiens
attttctagattttgasgtcttctttgagctcc

SEQ ID NO: 10000 - DNA, 33 bp, homo sapiens
gcatacagaattccaamttaaatgtataataat

SEQ ID NO: 10001 - DNA, 33 bp, homo sapiens
caactttcacccacaaycttttacacatactca

SEQ ID NO: 10002 - DNA, 33 bp, homo sapiens
gtctctgcacctcaacmattcttctacaaactc

SEQ ID NO: 10003 - DNA, 33 bp, homo sapiens
cctagagaatattgccragcaaaaacatgggtt

SEQ ID NO: 10004 - DNA, 33 bp, homo sapiens
gtgggttctactattaygcccagtttacagagg

SEQ ID NO: 10005 - DNA, 33 bp, homo sapiens
cgaagaacagttctgawattacacagttgatgc

SEQ ID NO: 10006 - DNA, 33 bp, homo sapiens
cccttgccaaaggctaygtggagatccaaaagt

SEQ ID NO: 10007 - DNA, 33 bp, homo sapiens
tagaaaattaccaaacygatgaactcaccggcc

SEQ ID NO: 10008 - DNA, 33 bp, homo sapiens
agtgctattcctttackcttgaatgatacacag

SEQ ID NO: 10009 - DNA, 33 bp, homo sapiens
gcctccatagaacttcrcccacagaaccaaata

SEQ ID NO: 10010 - DNA, 33 bp, homo sapiens
caacagtacaagtttgraatgtaggtaaattgt

SEQ ID NO: 10011 - DNA, 33 bp, homo sapiens
atcactcatacatgaawgcatctgtaagtaatc

SEQ ID NO: 10012 - DNA, 33 bp, homo sapiens
agccactcaaatcaaawatctagaagttcttga

SEQ ID NO: 10013 - DNA, 33 bp, homo sapiens
agtaactattgacttckacatagtttctttgag

SEQ ID NO: 10014 - DNA, 33 bp, homo sapiens
ttcttctgtcggttggragtggtagttcatgcc

SEQ ID NO: 10015 - DNA, 33 bp, homo sapiens
cttaccagtagaagtaygtttccttcttgtgtt

SEQ ID NO: 10016 - DNA, 33 bp, homo sapiens
aaaacccattctaacaytgacaacacaataaag

SEQ ID NO: 10017 - DNA, 33 bp, homo sapiens
cagttggcacctgggcracccagtatccagaac

SEQ ID NO: 10018 - DNA, 33 bp, homo sapiens
agccataactatctcgraagttatcaagtccag

SEQ ID NO: 10019 - DNA, 33 bp, homo sapiens
gatgtctcctcctcaawcaaatcatagtcccca

SEQ ID NO: 10020 - DNA, 33 bp, homo sapiens
ggaagctttagcaacaytaactgggcattatga

SEQ ID NO: 10021 - DNA, 33 bp, homo sapiens
agaagctagggtcaaarcgttgtcagtgtgaca

SEQ ID NO: 10022 - DNA, 33 bp, homo sapiens
cttatattatttaggcygccgtgttggaaatgt

SEQ ID NO: 10023 - DNA, 33 bp, homo sapiens
gttcattgagatgttaygagttattatctttca

SEQ ID NO: 10024 - DNA, 33 bp, homo sapiens
tccagatttgaggtccratatcaggaatgctct

SEQ ID NO: 10025 - DNA, 33 bp, homo sapiens
cttcagacacttaagcrcaaccacctggctcta

SEQ ID NO: 10026 - DNA, 33 bp, homo sapiens
gagttccaaaaagttcwcggacttcaggttaaa

SEQ ID NO: 10027 - DNA, 33 bp, homo sapiens
cacccgacctaaaagckccacttgatactgatc

SEQ ID NO: 10028 - DNA, 33 bp, homo sapiens
agaacttcgaaaacaakgtggtgttttattgtc

SEQ ID NO: 10029 - DNA, 33 bp, homo sapiens
gagttaagcctcaaaartcacaggagctgtatg

SEQ ID NO: 10030 - DNA, 33 bp, homo sapiens
catgacaatgcaccatmagcgtttactattatg

SEQ ID NO: 10031 - DNA, 33 bp, homo sapiens
ataagctcccatatgaycggaaactgaagacat

SEQ ID NO: 10032 - DNA, 33 bp, homo sapiens
gaataacaatgttgcayattaacacatcttccc

SEQ ID NO: 10033 - DNA, 33 bp, homo sapiens
tggtttggcattgaaaygagaagttattatgta

SEQ ID NO: 10034 - DNA, 33 bp, homo sapiens
gcttggggaatgtgtaygagtctgctggtgctg

SEQ ID NO: 10035 - DNA, 33 bp, homo sapiens
tctccacagcaggttcycatcacccaactcaat

SEQ ID NO: 10036 - DNA, 33 bp, homo sapiens
gggtggttaaaagtatraagtaggtgagaatta

SEQ ID NO: 10037 - DNA, 33 bp, homo sapiens
tgtgattattctgaaarccagtattggagtatc

SEQ ID NO: 10038 - DNA, 33 bp, homo sapiens
tctcatctaagaaaacrgcagtgcgggccgtga

SEQ ID NO: 10039 - DNA, 33 bp, homo sapiens
tgttgccacctagacaytcttccaaattgatat

SEQ ID NO: 10040 - DNA, 33 bp, homo sapiens
atagaattttggaatayggagttgtggacttct

SEQ ID NO: 10041 - DNA, 33 bp, homo sapiens
aagagccttcgaagacygtcactgggtggagca

SEQ ID NO: 10042 - DNA, 33 bp, homo sapiens
ggattgaattccaacargagaagtgcagtttag

SEQ ID NO: 10043 - DNA, 33 bp, homo sapiens
aagggcttacatttacrcagggatggtgggatt

SEQ ID NO: 10044 - DNA, 33 bp, homo sapiens
taccacatattcaacartggtcccacaagatta

SEQ ID NO: 10045 - DNA, 33 bp, homo sapiens
ccatgactgaagatttwaaaaaaaattaatgct

SEQ ID NO: 10046 - DNA, 33 bp, homo sapiens
gtcactcttcttgacartggccttaaaataggg

SEQ ID NO: 10047 - DNA, 33 bp, homo sapiens
aggggaaatgcttacgyaatcgctgtagagaaa

SEQ ID NO: 10048 - DNA, 33 bp, homo sapiens
cagctactcaagtagcygaggtaagaggatcac

SEQ ID NO: 10049 - DNA, 33 bp, homo sapiens
tattctaggaatacaakaatagtttagcatttg

SEQ ID NO: 10050 - DNA, 33 bp, homo sapiens
gaggtcaagttatggarggcctgcaaaccttaa

SEQ ID NO: 10051 - DNA, 33 bp, homo sapiens
gccatcattcccaataygaagagaggcactacc

SEQ ID NO: 10052 - DNA, 33 bp, homo sapiens
taacctggccttctgcratgggaagctttggga

SEQ ID NO: 10053 - DNA, 33 bp, homo sapiens
gtctctttcaatcagartcggtttctttggctt

SEQ ID NO: 10054 - DNA, 33 bp, homo sapiens
ggtttctgggaatagasaacagtttaaagaaat

SEQ ID NO: 10055 - DNA, 33 bp, homo sapiens
tgttgccaagccttgaygactcactgtgagggc

SEQ ID NO: 10056 - DNA, 33 bp, homo sapiens
atggaagaagaagaacractaagctgcctctag

SEQ ID NO: 10057 - DNA, 33 bp, homo sapiens
acattgctgcactatamaaacatattcacaaac

SEQ ID NO: 10058 - DNA, 33 bp, homo sapiens
agggatgagaaggcacrctgaaaaccaagcaac

SEQ ID NO: 10059 - DNA, 33 bp, homo sapiens
tctattctctaattcckacaaaggcaccatgtg

SEQ ID NO: 10060 - DNA, 33 bp, homo sapiens
gaagcagccaccagccratgaatcacagaagcc

SEQ ID NO: 10061 - DNA, 33 bp, homo sapiens
tgatttctgatttctcygaaaggaagtgttcca

SEQ ID NO: 10062 - DNA, 33 bp, homo sapiens
ttatgtgccctctttgmagctttctctgtcacc

SEQ ID NO: 10063 - DNA, 33 bp, homo sapiens
cttacagtccaacttcraccccaaggtgctttt

SEQ ID NO: 10064 - DNA, 33 bp, homo sapiens
gagctgttttacttcaygttggcagtttcaaac

SEQ ID NO: 10065 - DNA, 33 bp, homo sapiens
gttgacaattaaattargagatgtggcccctgt

SEQ ID NO: 10066 - DNA, 33 bp, homo sapiens
ggagtcatcctgtttayagcaacaagttggcaa

SEQ ID NO: 10067 - DNA, 33 bp, homo sapiens
agagacaataaacacayaattgaagagcagtta

SEQ ID NO: 10068 - DNA, 33 bp, homo sapiens
cgctcttccttctctcmcttagctgtcagcagc

SEQ ID NO: 10069 - DNA, 33 bp, homo sapiens
ggctgccaacacattgyaatttgagaagcatcc

SEQ ID NO: 10070 - DNA, 33 bp, homo sapiens
aaattgattttcttccratagcccgcatctgaa

SEQ ID NO: 10071 - DNA, 33 bp, homo sapiens
gccccgtcctcagtacyaacacctattcctgac

SEQ ID NO: 10072 - DNA, 33 bp, homo sapiens
ccttagtgataacccaktcacattttcagatag

SEQ ID NO: 10073 - DNA, 33 bp, homo sapiens
tctgacatctcctgaaracagggacaacttggt

SEQ ID NO: 10074 - DNA, 33 bp, homo sapiens
agggtggttccctttcraagttgctattccaaa

SEQ ID NO: 10075 - DNA, 33 bp, homo sapiens
ctttctcatcattccaraaagaaactttgtacc

SEQ ID NO: 10076 - DNA, 33 bp, homo sapiens
ctcctaggattgtaaamcctcaactcagtaccc

SEQ ID NO: 10077 - DNA, 33 bp, homo sapiens
gcatcagatccttccakacagtgtcagcaagcc

SEQ ID NO: 10078 - DNA, 33 bp, homo sapiens
tgcatagctaggaagtraccaataatgaaacaa

SEQ ID NO: 10079 - DNA, 33 bp, homo sapiens
gtgtcaacaaggcccakctcaacagctcccaag

SEQ ID NO: 10080 - DNA, 33 bp, homo sapiens
tccagatacagtgtgaragccagatagggcctt

SEQ ID NO: 10081 - DNA, 33 bp, homo sapiens
aggaaggtttaaagcascttgaatggagttcaa

SEQ ID NO: 10082 - DNA, 33 bp, homo sapiens
gtttgggtctactggcracaataaactatctcc

SEQ ID NO: 10083 - DNA, 33 bp, homo sapiens
ccctgatggccttaaamtgaagtgggctctctg

SEQ ID NO: 10084 - DNA, 33 bp, homo sapiens
gccacttcctgggcccracgtaaaggtgccttg

SEQ ID NO: 10085 - DNA, 33 bp, homo sapiens
aaatgtaaaacaaagcygctcttttctcaccaa

SEQ ID NO: 10086 - DNA, 33 bp, homo sapiens
atgacaattctcactcrcatgaaatggatcaaa

SEQ ID NO: 10087 - DNA, 33 bp, homo sapiens
agcgtatctgtctcccmcaattctaaccaaacc

SEQ ID NO: 10088 - DNA, 33 bp, homo sapiens
ggggagagaaagggaasagtattcaaagagcat

SEQ ID NO: 10089 - DNA, 33 bp, homo sapiens
ctggaggggaagaggasatactgcagagcttgg

SEQ ID NO: 10090 - DNA, 33 bp, homo sapiens
caatctggctattgaartgtaaacacagaagta

SEQ ID NO: 10091 - DNA, 33 bp, homo sapiens
gatatttgtaagttgcyattgcacatttaatta

SEQ ID NO: 10092 - DNA, 33 bp, homo sapiens
tgacagggttgagcacyggaggctacctgaacc

SEQ ID NO: 10093 - DNA, 33 bp, homo sapiens
aatttctagattacgarcaaagccagggaatct

SEQ ID NO: 10094 - DNA, 33 bp, homo sapiens
tgctttcctgattgtcraattcctcttacttga

SEQ ID NO: 10095 - DNA, 33 bp, homo sapiens
gggcaaggtctaccacrgctaccaaggtcttcc

SEQ ID NO: 10096 - DNA, 33 bp, homo sapiens
gttacaaaatgagaaakggtacaaagaatattc

SEQ ID NO: 10097 - DNA, 33 bp, homo sapiens
ccccattttatactccyacacaactgtatatga

SEQ ID NO: 10098 - DNA, 33 bp, homo sapiens
gctggtgaggtcaagayactgggctgaatgcaa

SEQ ID NO: 10099 - DNA, 33 bp, homo sapiens
aggaagtagaggagaaycattctgccaggctaa

SEQ ID NO: 10100 - DNA, 33 bp, homo sapiens
ccatctttaggtagaargtcactagaaagactc

SEQ ID NO: 10101 - DNA, 33 bp, homo sapiens
tgaggtctgcagggccrgaattacagaaatcct

SEQ ID NO: 10102 - DNA, 33 bp, homo sapiens
tctttagaattcgacargaaaggaaagctttat

SEQ ID NO: 10103 - DNA, 33 bp, homo sapiens
gcaccttactcattaamaacataatcaatccga

SEQ ID NO: 10104 - DNA, 33 bp, homo sapiens
tcttcaccacttccaayaataagagcaactgaa

SEQ ID NO: 10105 - DNA, 33 bp, homo sapiens
tgttgttaaaacagccrcttggctctgtcgctg

SEQ ID NO: 10106 - DNA, 33 bp, homo sapiens
attctgcattgcaatayggggcactttggagtc

SEQ ID NO: 10107 - DNA, 33 bp, homo sapiens
aagaaattgctcattaratgtttgctcaactga

SEQ ID NO: 10108 - DNA, 33 bp, homo sapiens
gcttcattagcttacaygtgcaaactggaggta

SEQ ID NO: 10109 - DNA, 33 bp, homo sapiens
acttacatttggaggasccatctcacataaaag

SEQ ID NO: 10110 - DNA, 33 bp, homo sapiens
ttctgtaatatgaaaartagattgactaataaa

SEQ ID NO: 10111 - DNA, 33 bp, homo sapiens
gacttcacagtataaarttgtttcgctttttcg

SEQ ID NO: 10112 - DNA, 33 bp, homo sapiens
ggtagacttgtggacaraaggcagataggaagt

SEQ ID NO: 10113 - DNA, 33 bp, homo sapiens
attcatttcgggtaaargtcatgttaacttaga

SEQ ID NO: 10114 - DNA, 33 bp, homo sapiens
acgtactttgcaactakattgtgtgtatttgaa

SEQ ID NO: 10115 - DNA, 33 bp, homo sapiens
atccgttccaaatcacsattgtaacgacgtctg

SEQ ID NO: 10116 - DNA, 33 bp, homo sapiens
ctagaaataacccggtyaagagaaatgcacaac

SEQ ID NO: 10117 - DNA, 33 bp, homo sapiens
taaaaattatacagccyaaagatgacacttaca

SEQ ID NO: 10118 - DNA, 33 bp, homo sapiens
taaaggcttatactgasacctttagaaatgaaa

SEQ ID NO: 10119 - DNA, 33 bp, homo sapiens
gaaagaatcatggctgmaacacagaggagggga

SEQ ID NO: 10120 - DNA, 33 bp, homo sapiens
ttcagaaggactaaaargagtttctgtgacctg

SEQ ID NO: 10121 - DNA, 33 bp, homo sapiens
aaccggagctggaagayggtaagtttggagagc

SEQ ID NO: 10122 - DNA, 33 bp, homo sapiens
agagaacctggttcaarctcaattgcaatcttt

SEQ ID NO: 10123 - DNA, 33 bp, homo sapiens
ggctgcctcgccgcccsgacttcccagcgccgg

SEQ ID NO: 10124 - DNA, 33 bp, homo sapiens
gggaacagtgaaaaacraagtcctgaatgaggt

SEQ ID NO: 10125 - DNA, 33 bp, homo sapiens
aagcatgattggggttraacatctgccaccatc

SEQ ID NO: 10126 - DNA, 33 bp, homo sapiens
tattaatgccagcaaasagtctttataggatga

SEQ ID NO: 10127 - DNA, 33 bp, homo sapiens
ctctgatgtgaatgaayaagaagtgctctgagc

SEQ ID NO: 10128 - DNA, 33 bp, homo sapiens
atcttgccattagacartcagaaacctgtgtag

SEQ ID NO: 10129 - DNA, 33 bp, homo sapiens
gttacttgtagtaaccmaactacactacactag

SEQ ID NO: 10130 - DNA, 33 bp, homo sapiens
gagcaataacaaatgcraatcagagaaccattt

SEQ ID NO: 10131 - DNA, 33 bp, homo sapiens
aaccgagttctaaagcraataaggacttttcca

SEQ ID NO: 10132 - DNA, 33 bp, homo sapiens
ctacttctgtgacgcaycgcccatcctgaaact

SEQ ID NO: 10133 - DNA, 33 bp, homo sapiens
atgaacaaattccaaascactattttaagctta

SEQ ID NO: 10134 - DNA, 33 bp, homo sapiens
aaaacgtgagatcacarctcaaaaaatcaattt

SEQ ID NO: 10135 - DNA, 33 bp, homo sapiens
aggaaataatgaagaawgattctttgctgtcta

SEQ ID NO: 10136 - DNA, 33 bp, homo sapiens
ctcaaaaaggagagackgaactttctaaaacta

SEQ ID NO: 10137 - DNA, 33 bp, homo sapiens
ccttcctttactcacarctgtcttggtaaattc

SEQ ID NO: 10138 - DNA, 33 bp, homo sapiens
ggcttttgctctccaastactctaaagacactg

SEQ ID NO: 10139 - DNA, 33 bp, homo sapiens
gtatatatataccacaracattcacacaattac

SEQ ID NO: 10140 - DNA, 33 bp, homo sapiens
gaggagataggacaaaygtaagtagctgtaatg

SEQ ID NO: 10141 - DNA, 33 bp, homo sapiens
gcaggtctctggcagasagcgactggggcctgg

SEQ ID NO: 10142 - DNA, 33 bp, homo sapiens
ttgtttcttgagcagasctagtggccgtgctgg

SEQ ID NO: 10143 - DNA, 33 bp, homo sapiens
tttaaaaaggtaagcamaggtcacatttgtaga

SEQ ID NO: 10144 - DNA, 33 bp, homo sapiens
accttttgctggtcccraatgtcctgttgcttt

SEQ ID NO: 10145 - DNA, 33 bp, homo sapiens
ccggggaaaatggctgraacattccacaggtga

SEQ ID NO: 10146 - DNA, 33 bp, homo sapiens
ccctgatgaatcttaayatgttccaggtttcca

SEQ ID NO: 10147 - DNA, 33 bp, homo sapiens
tgctagcctaataggaraccacagttaacagtc

SEQ ID NO: 10148 - DNA, 33 bp, homo sapiens
aatatcagtattcccaygaaacaatgagaaaaa

SEQ ID NO: 10149 - DNA, 33 bp, homo sapiens
gtcctgggtctgagcamcgcctcctcctgtgtg

SEQ ID NO: 10150 - DNA, 33 bp, homo sapiens
aggaaaattctgtcaaraggaaatgggattact

SEQ ID NO: 10151 - DNA, 33 bp, homo sapiens
cttctttattgtagacraaactttctaaggcct

SEQ ID NO: 10152 - DNA, 33 bp, homo sapiens
agagagaagtagggcarccaaattgctttcaca

SEQ ID NO: 10153 - DNA, 33 bp, homo sapiens
cacagtgtcactgtaaygtacctaataggagga

SEQ ID NO: 10154 - DNA, 33 bp, homo sapiens
cccaaagattttaaaarctccatgccaagaacc

SEQ ID NO: 10155 - DNA, 33 bp, homo sapiens
aatgtggcaccaactaygtggagtatactttct

SEQ ID NO: 10156 - DNA, 33 bp, homo sapiens
tacaaagacactattayagagggggacaatgag

SEQ ID NO: 10157 - DNA, 33 bp, homo sapiens
atagggcagaaggaaaygctgggaggcgatgga

SEQ ID NO: 10158 - DNA, 33 bp, homo sapiens
ggggagtggatttagaygctttcttagattctt

SEQ ID NO: 10159 - DNA, 33 bp, homo sapiens
atgagtttctttgatcmctggctatgctcttcc

SEQ ID NO: 10160 - DNA, 33 bp, homo sapiens
aggcattcaaacagaarctgaaagtatagctct

SEQ ID NO: 10161 - DNA, 33 bp, homo sapiens
ggtaaaagctagagtgyaaagcaacaaggatgt

SEQ ID NO: 10162 - DNA, 33 bp, homo sapiens
ccagcagtgttacaaaygtcctccctaaacaca

SEQ ID NO: 10163 - DNA, 33 bp, homo sapiens
catccaacattgctgtsaaagcacatttttagc

SEQ ID NO: 10164 - DNA, 33 bp, homo sapiens
ccgaggtgaactcacaraatcctagaagcttag

SEQ ID NO: 10165 - DNA, 33 bp, homo sapiens
atgtaggctgggaaacratgaggcccaggacag

SEQ ID NO: 10166 - DNA, 33 bp, homo sapiens
cagcccaggattaaagscctcacagatagggac

SEQ ID NO: 10167 - DNA, 33 bp, homo sapiens
gagaatttaatcaaggkcaacgaaccatgagac

SEQ ID NO: 10168 - DNA, 33 bp, homo sapiens
tcagggagcggtacaakgtgctaagtatgtctt

SEQ ID NO: 10169 - DNA, 33 bp, homo sapiens
gacgtaggcacaagaayctcctagaatggaagt

SEQ ID NO: 10170 - DNA, 33 bp, homo sapiens
ttacaggaaaaaggcasagggatgtcaaataca

SEQ ID NO: 10171 - DNA, 33 bp, homo sapiens
tgggccaaagactcacraaattcatcatctctt

SEQ ID NO: 10172 - DNA, 33 bp, homo sapiens
cgccttcctctttaagyctgcaagaaccctagt

SEQ ID NO: 10173 - DNA, 33 bp, homo sapiens
ctcgtacacactggccrcaaacaccgttaccct

SEQ ID NO: 10174 - DNA, 33 bp, homo sapiens
ggcaactgaaaggaacycaatggcagcgacccc

SEQ ID NO: 10175 - DNA, 33 bp, homo sapiens
tggcagcgaccccaaakacgttgcttcagccac

SEQ ID NO: 10176 - DNA, 33 bp, homo sapiens
aaaaataaatggcatcyaagaaacaggggatcc

SEQ ID NO: 10177 - DNA, 33 bp, homo sapiens
aaaccattaaaggaaaygctgatagatctaatt

SEQ ID NO: 10178 - DNA, 33 bp, homo sapiens
cagactcagtttcaggracagcctggactactt

SEQ ID NO: 10179 - DNA, 33 bp, homo sapiens
ggtcaggtcgattaacrgtgaacgcagaaggcc

SEQ ID NO: 10180 - DNA, 33 bp, homo sapiens
tgtgctgttgcaccacrcatgcttttgcttggg

SEQ ID NO: 10181 - DNA, 33 bp, homo sapiens
ctcttcgtgtcttctamccacaaacttaatgcc

SEQ ID NO: 10182 - DNA, 33 bp, homo sapiens
ctaacatacatatgcargatgcttcactcaaca

SEQ ID NO: 10183 - DNA, 33 bp, homo sapiens
ccagttaaagacaccaragaacttgtgcatagg

SEQ ID NO: 10184 - DNA, 33 bp, homo sapiens
tgtaagtgggaaagaaracttcgataggctgct

SEQ ID NO: 10185 - DNA, 33 bp, homo sapiens
gtttcctttcatcctgyatggatcctggcaaac

SEQ ID NO: 10186 - DNA, 33 bp, homo sapiens
atgcagatattcaccarggaactggaacgttct

SEQ ID NO: 10187 - DNA, 33 bp, homo sapiens
tccaccctttttcttcyatgcatttgttttgct

SEQ ID NO: 10188 - DNA, 33 bp, homo sapiens
tgtctcagggtagagcrcatgatacagcccaga

SEQ ID NO: 10189 - DNA, 33 bp, homo sapiens
gcattgctattctgaaygggtgaactcataaac

SEQ ID NO: 10190 - DNA, 33 bp, homo sapiens
agggagtctaaactcgyacacttcctcctttcc

SEQ ID NO: 10191 - DNA, 33 bp, homo sapiens
taatctcttatgtgtgraagtctttaaatcttc

SEQ ID NO: 10192 - DNA, 33 bp, homo sapiens
gcctatctatctaacamctctgacaacagaaga

SEQ ID NO: 10193 - DNA, 33 bp, homo sapiens
gagttctaaatccagcyacaagttcttcaaccc

SEQ ID NO: 10194 - DNA, 33 bp, homo sapiens
ccctgacccaaactccrgagtgctaacctaaca

SEQ ID NO: 10195 - DNA, 33 bp, homo sapiens
aaaacacacacattctraatggatgtcttgggt

SEQ ID NO: 10196 - DNA, 33 bp, homo sapiens
caggtgtctgattaaawcaacttactgagtaca

SEQ ID NO: 10197 - DNA, 33 bp, homo sapiens
tatcctgagaatcatasagccactggagagaga

SEQ ID NO: 10198 - DNA, 33 bp, homo sapiens
ctcatcatctgtgccaygctggataaaactctc

SEQ ID NO: 10199 - DNA, 33 bp, homo sapiens
actgtacgtgagagacycttttctctgctaatc

SEQ ID NO: 10200 - DNA, 33 bp, homo sapiens
atggttgtgatccaaasagcctactatgacaaa

SEQ ID NO: 10201 - DNA, 33 bp, homo sapiens
ttttgattctaatcagsaagttgaaaaggatgc

SEQ ID NO: 10202 - DNA, 33 bp, homo sapiens
gcttctaaggaccaccrgcaaaatcatggccca

SEQ ID NO: 10203 - DNA, 33 bp, homo sapiens
cttatgccaaaattcamatcagtttgtgttcac

SEQ ID NO: 10204 - DNA, 33 bp, homo sapiens
cagaaggtgagagagcrgagaaaatatctaata

SEQ ID NO: 10205 - DNA, 33 bp, homo sapiens
gtaaaaccagaaagaayggcattgagaaattag

SEQ ID NO: 10206 - DNA, 33 bp, homo sapiens
atggcccagatagcccrgaaggaacctcagaga

SEQ ID NO: 10207 - DNA, 33 bp, homo sapiens
cggggtgcgagcttccraattcaggttgtgtcc

SEQ ID NO: 10208 - DNA, 33 bp, homo sapiens
aaaaaatgttataaaaygactagtggtagttat

SEQ ID NO: 10209 - DNA, 33 bp, homo sapiens
cctgtctcccagtgtarcggacagtcctgacct

SEQ ID NO: 10210 - DNA, 33 bp, homo sapiens
catcttgaagcaaaacygccatgaagacctatg

SEQ ID NO: 10211 - DNA, 33 bp, homo sapiens
tggtcttgctgtctaaragtagcaaaggtggag

SEQ ID NO: 10212 - DNA, 33 bp, homo sapiens
ccaggtgaaggaactgyaagcaattggatccaa

SEQ ID NO: 10213 - DNA, 33 bp, homo sapiens
tggacatgtaccctcaygtgttccgcaagaaga

SEQ ID NO: 10214 - DNA, 33 bp, homo sapiens
taactgctattataaaycacagtggacccttga

SEQ ID NO: 10215 - DNA, 33 bp, homo sapiens
tgcattagtttcaaatkaacatggaatattcca

SEQ ID NO: 10216 - DNA, 33 bp, homo sapiens
gaaccagctcagcgacygtccctagtaattctc

SEQ ID NO: 10217 - DNA, 33 bp, homo sapiens
agagtgagagagattayggatgttctcctgaga

SEQ ID NO: 10218 - DNA, 33 bp, homo sapiens
tcttctgtgcatttcartctcatcaaaggctct

SEQ ID NO: 10219 - DNA, 33 bp, homo sapiens
tatctggattttggtaycttccttaatgaaggg

SEQ ID NO: 10220 - DNA, 33 bp, homo sapiens
accgacctctggcccaycttttgtctccacgcc

SEQ ID NO: 10221 - DNA, 33 bp, homo sapiens
cactacaaaaagtacaytccacaatgagtaaga

SEQ ID NO: 10222 - DNA, 33 bp, homo sapiens
catgctggaagaatgcycgtctgctggacaatc

SEQ ID NO: 10223 - DNA, 33 bp, homo sapiens
tctcatcttggacttamggttagtttagcacaa

SEQ ID NO: 10224 - DNA, 33 bp, homo sapiens
cttggggatcaaggcargagagcatttccagga

SEQ ID NO: 10225 - DNA, 33 bp, homo sapiens
catgtttggggatagcrgaagtgggatatataa

SEQ ID NO: 10226 - DNA, 33 bp, homo sapiens
ttcccttggtaatccasgttttcacttagagga

SEQ ID NO: 10227 - DNA, 33 bp, homo sapiens
aggacccgggaggtagrcattttacagccagga

SEQ ID NO: 10228 - DNA, 33 bp, homo sapiens
accataggtaccccccyaaatggctattacaag

SEQ ID NO: 10229 - DNA, 33 bp, homo sapiens
aatcttaaataaaatcsatgttccaggaaaact

SEQ ID NO: 10230 - DNA, 33 bp, homo sapiens
gctatggtgtttcagcyactgacttcaggtagc

SEQ ID NO: 10231 - DNA, 33 bp, homo sapiens
tgatgggcttaaaaggmatgaagagaaaaggtt

SEQ ID NO: 10232 - DNA, 33 bp, homo sapiens
catttccctttttatcragattcaagagcagag

SEQ ID NO: 10233 - DNA, 33 bp, homo sapiens
ggggttcacagattgartagaagaataaatgcc

SEQ ID NO: 10234 - DNA, 33 bp, homo sapiens
ttattcctcaaaaaaaygctcatataagtgaca

SEQ ID NO: 10235 - DNA, 33 bp, homo sapiens
caacaacgaatgactcyctttgcttcagttcta

SEQ ID NO: 10236 - DNA, 33 bp, homo sapiens
tctctagaatcaccacrgatttgggcatgtatg

SEQ ID NO: 10237 - DNA, 33 bp, homo sapiens
ttcaagggtatccactraagaagccacatggtt

SEQ ID NO: 10238 - DNA, 33 bp, homo sapiens
ctacactataacctccyaattagtcttcctaca

SEQ ID NO: 10239 - DNA, 33 bp, homo sapiens
gcacacactacatgtcrgacacagtttaggcaa

SEQ ID NO: 10240 - DNA, 33 bp, homo sapiens
gctgtgtgaagaacaastcacattttgtttaag

SEQ ID NO: 10241 - DNA, 33 bp, homo sapiens
aggacaaagacctgcasaaagtttcccatctgg

SEQ ID NO: 10242 - DNA, 33 bp, homo sapiens
agaatagatcaaagtawaaggttagtatgtgat

SEQ ID NO: 10243 - DNA, 33 bp, homo sapiens
gatcttgaaagttatcrccacaatgaaatgata

SEQ ID NO: 10244 - DNA, 33 bp, homo sapiens
ttactaattttggctgyagtatatttgaagact

SEQ ID NO: 10245 - DNA, 33 bp, homo sapiens
ctttcagacatcgtgcratttaacaaagggttt

SEQ ID NO: 10246 - DNA, 33 bp, homo sapiens
gggatctctcacctatsaaaatcagacattcac

SEQ ID NO: 10247 - DNA, 33 bp, homo sapiens
cttttggttacatgaakaataatgctgtgagtg

SEQ ID NO: 10248 - DNA, 33 bp, homo sapiens
actgtcacaagcaaagsagaaaccatgtcaagg

SEQ ID NO: 10249 - DNA, 33 bp, homo sapiens
gagcatatggtctaggmacaggaggcacttgat

SEQ ID NO: 10250 - DNA, 33 bp, homo sapiens
aaaggaagaaaatacgkacacagagaatgcggg

SEQ ID NO: 10251 - DNA, 33 bp, homo sapiens
tgcagtgtgcgcaaaargaacatccatcatgtc

SEQ ID NO: 10252 - DNA, 33 bp, homo sapiens
aactcactggggttacratggatccaaaaccaa

SEQ ID NO: 10253 - DNA, 33 bp, homo sapiens
cagccagcccatggaakaaatcagagtcaggag

SEQ ID NO: 10254 - DNA, 33 bp, homo sapiens
cactattttagatgtaygttgtctgcatcctgg

SEQ ID NO: 10255 - DNA, 33 bp, homo sapiens
tccttactgattctccmaaccttactggaaaga

SEQ ID NO: 10256 - DNA, 33 bp, homo sapiens
cacaggaggccaagctwacaaaagacaaggctt

SEQ ID NO: 10257 - DNA, 33 bp, homo sapiens
tggctctcttgtcatamcccagtctttttcttc

SEQ ID NO: 10258 - DNA, 33 bp, homo sapiens
tgatgcggttctaagascactattttaattact

SEQ ID NO: 10259 - DNA, 33 bp, homo sapiens
tctgtcattgaagtatyagtgttctcagagttc

SEQ ID NO: 10260 - DNA, 33 bp, homo sapiens
tagaaagtgcagaaacwcctgagtggtggtata

SEQ ID NO: 10261 - DNA, 33 bp, homo sapiens
actggcttggatccgamccgacgaatgagatct

SEQ ID NO: 10262 - DNA, 33 bp, homo sapiens
tgtgcagagaattaaaytgtggagatgccatat

SEQ ID NO: 10263 - DNA, 33 bp, homo sapiens
tatgggggagagaatamcatagatctaaactgg

SEQ ID NO: 10264 - DNA, 33 bp, homo sapiens
atggtgaagggactcargttgacaaaatgtctt

SEQ ID NO: 10265 - DNA, 33 bp, homo sapiens
tggtgttttctcatcamagatctgttcaaatta

SEQ ID NO: 10266 - DNA, 33 bp, homo sapiens
tttaaagtgctttccartaagcttcatgtacgt

SEQ ID NO: 10267 - DNA, 33 bp, homo sapiens
aagaagtcttaggtccrgaaacctacaggtcca

SEQ ID NO: 10268 - DNA, 33 bp, homo sapiens
aaagatgctcgttgtamgtctccatgttgctaa

SEQ ID NO: 10269 - DNA, 33 bp, homo sapiens
atagggtaacgacgaaygtattaaaattcacac

SEQ ID NO: 10270 - DNA, 33 bp, homo sapiens
tactaaaagaggtgacrggaggaatttggccca

SEQ ID NO: 10271 - DNA, 33 bp, homo sapiens
taataatagacttaaasggcactggagggagtg

SEQ ID NO: 10272 - DNA, 33 bp, homo sapiens
gagccatttggaggacyagtggtatggaatgca

SEQ ID NO: 10273 - DNA, 33 bp, homo sapiens
agcctgaagtttttaayatacaccacgtgtaca

SEQ ID NO: 10274 - DNA, 33 bp, homo sapiens
cttttatcctgtaatgragaaaaatccatattc

SEQ ID NO: 10275 - DNA, 33 bp, homo sapiens
cacatgagatttatctragaagtgcaagttttg

SEQ ID NO: 10276 - DNA, 33 bp, homo sapiens
aggtgccagggcactgraaattctttaaataca

SEQ ID NO: 10277 - DNA, 33 bp, homo sapiens
gctagacacgtggctayctaaatttaatcaaaa

SEQ ID NO: 10278 - DNA, 33 bp, homo sapiens
cctttaaaggttaaacmagaatttgtgtgtgat

SEQ ID NO: 10279 - DNA, 33 bp, homo sapiens
ttacagaaacaaaaaaygtaagaacagcaaccc

SEQ ID NO: 10280 - DNA, 33 bp, homo sapiens
gtcttctgttttcctcyactagattgtgttttt

SEQ ID NO: 10281 - DNA, 33 bp, homo sapiens
tagctacacagagaatsaaacaggaggattgtt

SEQ ID NO: 10282 - DNA, 33 bp, homo sapiens
ttcttgctatgtcctcraaaaaggagctgcctt

SEQ ID NO: 10283 - DNA, 33 bp, homo sapiens
tgggaatgagcctccartgaaagatgcttaaca

SEQ ID NO: 10284 - DNA, 33 bp, homo sapiens
ctggcttatgtgcttayagaggcagacaagccc

SEQ ID NO: 10285 - DNA, 33 bp, homo sapiens
actaagagctgaacacrgagttgcctttgcctc

SEQ ID NO: 10286 - DNA, 33 bp, homo sapiens
ccaggagatagaagacwagtagttattttcctc

SEQ ID NO: 10287 - DNA, 33 bp, homo sapiens
tagaagctgaaaaacamgttggttcaggacgcc

SEQ ID NO: 10288 - DNA, 33 bp, homo sapiens
gtatgcctgcaaggaaracatcagctaaggtct

SEQ ID NO: 10289 - DNA, 33 bp, homo sapiens
acattcagtatctagcrccatctgtggggcctt

SEQ ID NO: 10290 - DNA, 33 bp, homo sapiens
cgggcatccagggacawcatattacaaggcggt

SEQ ID NO: 10291 - DNA, 33 bp, homo sapiens
ggggattaggatgccamtgcggtggagtaaatc

SEQ ID NO: 10292 - DNA, 33 bp, homo sapiens
tgattgtggaacatgaktatggttataacaaca

SEQ ID NO: 10293 - DNA, 33 bp, homo sapiens
ctacttgccaggaaacraaaagtattccatgtg

SEQ ID NO: 10294 - DNA, 33 bp, homo sapiens
ctaggaggtaaatatgwagtagaatgtgtggca

SEQ ID NO: 10295 - DNA, 33 bp, homo sapiens
agtttaagtaattagcsgatgtggtttggctct

SEQ ID NO: 10296 - DNA, 33 bp, homo sapiens
attcaagaggtatcccraccctagcaggaaaag

SEQ ID NO: 10297 - DNA, 33 bp, homo sapiens
aagaatgtggagctaamgaaactctcattcatg

SEQ ID NO: 10298 - DNA, 33 bp, homo sapiens
ctagagttttactgaasactgggcagtatagcc

SEQ ID NO: 10299 - DNA, 33 bp, homo sapiens
catcctttgccactctsagaggcagaatgtgtt

SEQ ID NO: 10300 - DNA, 33 bp, homo sapiens
caggtacaaagccttcrctgttctgtctctgct

SEQ ID NO: 10301 - DNA, 33 bp, homo sapiens
agctgggcagctgatasgaacaacattcagctc

SEQ ID NO: 10302 - DNA, 33 bp, homo sapiens
tgagaatggtgcgacayattattaaaatgtcca

SEQ ID NO: 10303 - DNA, 33 bp, homo sapiens
gaagaggccatctttakatctcaactctttttt

SEQ ID NO: 10304 - DNA, 33 bp, homo sapiens
aggaaccattgctaaartgaacaaggccagcag

SEQ ID NO: 10305 - DNA, 33 bp, homo sapiens
cacataaatcagtgaasaagccttgagagttct

SEQ ID NO: 10306 - DNA, 33 bp, homo sapiens
ttattagtatgtaatargagaaagcaggaatga

SEQ ID NO: 10307 - DNA, 33 bp, homo sapiens
atatgcaaagtaatgaygattatgttaaaccaa

SEQ ID NO: 10308 - DNA, 33 bp, homo sapiens
ccagctagtgtaagagsctcctatgattcttag

SEQ ID NO: 10309 - DNA, 33 bp, homo sapiens
gatatgtacaaagtgasaataggtaaggttaca

SEQ ID NO: 10310 - DNA, 33 bp, homo sapiens
caattctaaattaggcmaatgatgggaatgtca

SEQ ID NO: 10311 - DNA, 33 bp, homo sapiens
atgtagtaaatatccakgaaaccactacctagg

SEQ ID NO: 10312 - DNA, 33 bp, homo sapiens
gacacaactctacacamaatgccattgaaagga

SEQ ID NO: 10313 - DNA, 33 bp, homo sapiens
aaccctgtggaggtcarccaaatagttcaggca

SEQ ID NO: 10314 - DNA, 33 bp, homo sapiens
gtccttgggttattcaytccagtgactgtatac

SEQ ID NO: 10315 - DNA, 33 bp, homo sapiens
gtccacttaagagttaracaagatcgtactgtg

SEQ ID NO: 10316 - DNA, 33 bp, homo sapiens
atcttaggataaaataytaaggactcagaacac

SEQ ID NO: 10317 - DNA, 33 bp, homo sapiens
ataactcatttacttgmattaatctgtgtgtcc

SEQ ID NO: 10318 - DNA, 33 bp, homo sapiens
taagtatatttgctacygaaataatgtctttgt

SEQ ID NO: 10319 - DNA, 33 bp, homo sapiens
atgaagaaatacataargcaaagcatataagaa

SEQ ID NO: 10320 - DNA, 33 bp, homo sapiens
tgtaagggcaaacaaamtaagttgtctctttgt

SEQ ID NO: 10321 - DNA, 33 bp, homo sapiens
aaaagatatatgtcacrggaaatgattacaata

SEQ ID NO: 10322 - DNA, 33 bp, homo sapiens
gtttctgtactgaacaygtgcagatattttttc

SEQ ID NO: 10323 - DNA, 33 bp, homo sapiens
tcaaccaaaatcatacyggtagcataaagcaca

SEQ ID NO: 10324 - DNA, 33 bp, homo sapiens
cattgtgtgtttaaackagagattcattgagtg

SEQ ID NO: 10325 - DNA, 33 bp, homo sapiens
aaagattccacatatamgtaaaatcatacagtt

SEQ ID NO: 10326 - DNA, 33 bp, homo sapiens
tttatcccaggtattgyatcaggctggaaatcc

SEQ ID NO: 10327 - DNA, 33 bp, homo sapiens
gagtgaaggaggttgcrctttcttttctgctga

SEQ ID NO: 10328 - DNA, 33 bp, homo sapiens
aaagacaaactgttctsaaaggagtttaaaaac

SEQ ID NO: 10329 - DNA, 33 bp, homo sapiens
caataatcaagaatacrgatcaattttatctgg

SEQ ID NO: 10330 - DNA, 33 bp, homo sapiens
acacattaacataataycaacgtagagctcatt

SEQ ID NO: 10331 - DNA, 33 bp, homo sapiens
ttacgccattttgttckcagcctttataatcac

SEQ ID NO: 10332 - DNA, 33 bp, homo sapiens
ctattcaggctttatartactgcatcctctata

SEQ ID NO: 10333 - DNA, 33 bp, homo sapiens
gctgtccattgcttaaygcaggttatttcatta

SEQ ID NO: 10334 - DNA, 33 bp, homo sapiens
gtatgatttggaaaccmcagatatggtgggcaa

SEQ ID NO: 10335 - DNA, 33 bp, homo sapiens
agaacctactctttaayacaaaatcagtataaa

SEQ ID NO: 10336 - DNA, 33 bp, homo sapiens
gggtcctttcctttacrgcaacagtttccctct

SEQ ID NO: 10337 - DNA, 33 bp, homo sapiens
gactgtgatcttttcaytacacagttttccttt

SEQ ID NO: 10338 - DNA, 33 bp, homo sapiens
aactagaagttacccayattcaacccaccgaat

SEQ ID NO: 10339 - DNA, 33 bp, homo sapiens
atgttctcattatttaygtggcttttgctttat

SEQ ID NO: 10340 - DNA, 33 bp, homo sapiens
ccgctcttgccccttcrcatcattatataggca

SEQ ID NO: 10341 - DNA, 33 bp, homo sapiens
agtagccactactatcrcaatatcattacatag

SEQ ID NO: 10342 - DNA, 33 bp, homo sapiens
ttggctggattaacaayaaaaaatttctgccag

SEQ ID NO: 10343 - DNA, 33 bp, homo sapiens
ttctgcctaataagtaygtcagtcatttaaaag

SEQ ID NO: 10344 - DNA, 33 bp, homo sapiens
tccagccactgaacacsacctgagattccccac

SEQ ID NO: 10345 - DNA, 33 bp, homo sapiens
gcaaattttaagcgtgraaattaaatgattagc

SEQ ID NO: 10346 - DNA, 33 bp, homo sapiens
ttttaaacaagcttgcrccatgattcatatgca

SEQ ID NO: 10347 - DNA, 33 bp, homo sapiens
gttgaggaagattgcamatgattgacaggcatg

SEQ ID NO: 10348 - DNA, 33 bp, homo sapiens
ttttttggcccctgagragacagcagacctcaa

SEQ ID NO: 10349 - DNA, 33 bp, homo sapiens
gaaccttattcatcccrcatctctatttgtctt

SEQ ID NO: 10350 - DNA, 33 bp, homo sapiens
acatgtctggacttaamatgtgggaagtgaggg

SEQ ID NO: 10351 - DNA, 33 bp, homo sapiens
ccagagactctgagaakatctggagtagggcct

SEQ ID NO: 10352 - DNA, 33 bp, homo sapiens
tggataaaactactgawgtcataaggcccaaat

SEQ ID NO: 10353 - DNA, 33 bp, homo sapiens
atgtaaatcgtgtatcragtgaaaggctgatca

SEQ ID NO: 10354 - DNA, 33 bp, homo sapiens
tgggaagagcaagtaaratgttgtctctgccat

SEQ ID NO: 10355 - DNA, 33 bp, homo sapiens
atggagaaataggggamagtcaagtgaaaggtg

SEQ ID NO: 10356 - DNA, 33 bp, homo sapiens
tctaagcccttgtaaakttggaatctgtaagca

SEQ ID NO: 10357 - DNA, 33 bp, homo sapiens
acacattcatcctaacracagtgagatatgaaa

SEQ ID NO: 10358 - DNA, 33 bp, homo sapiens
ctgattggtactatgaygtttaaagatttcctt

SEQ ID NO: 10359 - DNA, 33 bp, homo sapiens
gggcacacactttttcyaaaacgcaaagtctac

SEQ ID NO: 10360 - DNA, 33 bp, homo sapiens
cctggcctctctaagtractcgccttccccacc

SEQ ID NO: 10361 - DNA, 33 bp, homo sapiens
tattcaatgatgtcaaytgttatccttcctcat

SEQ ID NO: 10362 - DNA, 33 bp, homo sapiens
ccttcctaagcacatarctaatgactcctcctt

SEQ ID NO: 10363 - DNA, 33 bp, homo sapiens
ctttctacttctctgastacagacttatagtac

SEQ ID NO: 10364 - DNA, 33 bp, homo sapiens
aatgtacactaactacrggtaaaagtgaagtgc

SEQ ID NO: 10365 - DNA, 33 bp, homo sapiens
caataaatgcagtttcyagtatcaattcttgga

SEQ ID NO: 10366 - DNA, 33 bp, homo sapiens
gattataacactcctcrcatagcctcatctata

SEQ ID NO: 10367 - DNA, 33 bp, homo sapiens
tcaattgtaaagactaygtagcaaaatttttga

SEQ ID NO: 10368 - DNA, 33 bp, homo sapiens
acctcagcaatgcacaytatagtcttgtaacaa

SEQ ID NO: 10369 - DNA, 33 bp, homo sapiens
attcctttgactatcasctaatggaccagtcac

SEQ ID NO: 10370 - DNA, 33 bp, homo sapiens
atggaggatcactgaartaggctctactgaata

SEQ ID NO: 10371 - DNA, 33 bp, homo sapiens
cctgtctcaaacacaargctatgtgatgtgtgg

SEQ ID NO: 10372 - DNA, 33 bp, homo sapiens
cagcaagagcaaaaaasactcatcacagaatgg

SEQ ID NO: 10373 - DNA, 33 bp, homo sapiens
agaatcagctgcttccmgaggacaaacagttac

SEQ ID NO: 10374 - DNA, 33 bp, homo sapiens
gaatcaaattataaacmaagcacagaaaatgat

SEQ ID NO: 10375 - DNA, 33 bp, homo sapiens
attttgccatgataaakatttcaattcagaaga

SEQ ID NO: 10376 - DNA, 33 bp, homo sapiens
agaagcaaaaattgacrgaactgaaaagggaaa

SEQ ID NO: 10377 - DNA, 33 bp, homo sapiens
gtttgttcaatcttagyagttgctgtcctttgg

SEQ ID NO: 10378 - DNA, 33 bp, homo sapiens
gtcatttgcatgattasagaaagaaaaagtcac

SEQ ID NO: 10379 - DNA, 33 bp, homo sapiens
tttattgtacaaatacygcttcctcagccaatg

SEQ ID NO: 10380 - DNA, 33 bp, homo sapiens
aaaatgcagtagaaagwcaaatcatgctgtgag

SEQ ID NO: 10381 - DNA, 33 bp, homo sapiens
acctgcttaattatacwcaaaaactggttttag

SEQ ID NO: 10382 - DNA, 33 bp, homo sapiens
gcaattgcttttgaaaygattcttccaggaggc

SEQ ID NO: 10383 - DNA, 33 bp, homo sapiens
cacacctgacacccaarcaatatttgcccagtc

SEQ ID NO: 10384 - DNA, 33 bp, homo sapiens
atacgcacattaaatcrcttagcaagaatcttg

SEQ ID NO: 10385 - DNA, 33 bp, homo sapiens
tgacttcatggggtgayaggttcctggagtacc

SEQ ID NO: 10386 - DNA, 33 bp, homo sapiens
agaagcatcacacttayataggctatttaacca

SEQ ID NO: 10387 - DNA, 33 bp, homo sapiens
tctaaaacatgagatcraagcaaaacaaaaaaa

SEQ ID NO: 10388 - DNA, 33 bp, homo sapiens
cacctaggttttgagcraagggtcagaagagag

SEQ ID NO: 10389 - DNA, 33 bp, homo sapiens
caaacatacactgaaamcatgatgctaagtgat

SEQ ID NO: 10390 - DNA, 33 bp, homo sapiens
aggcaagaagagtcacsattctagcagaagaaa

SEQ ID NO: 10391 - DNA, 33 bp, homo sapiens
acatctccctggcaccmaaaatccccaaaacat

SEQ ID NO: 10392 - DNA, 33 bp, homo sapiens
aggtggcagtgggtaaygtgtgcaccaagaaaa

SEQ ID NO: 10393 - DNA, 33 bp, homo sapiens
gccctgtaaaaataacsaattcctccaactgtg

SEQ ID NO: 10394 - DNA, 33 bp, homo sapiens
gaaagaacaaaaccacygaatgaggcattatgt

SEQ ID NO: 10395 - DNA, 33 bp, homo sapiens
gaaaactgaaacagaayaaatttggctgtccag

SEQ ID NO: 10396 - DNA, 33 bp, homo sapiens
aatctcatcagcaacaratattagtttcccctg

SEQ ID NO: 10397 - DNA, 33 bp, homo sapiens
tggggcccagtgctaaragagaggccgatgttt

SEQ ID NO: 10398 - DNA, 33 bp, homo sapiens
ggcaacatttcttcaayccttataaggtgctgg

SEQ ID NO: 10399 - DNA, 33 bp, homo sapiens
aggtaggatgtaattayagggattgacaatcaa

SEQ ID NO: 10400 - DNA, 33 bp, homo sapiens
catttgcataagttcartaacaatttgctgtct

SEQ ID NO: 10401 - DNA, 33 bp, homo sapiens
tagcatggattacttasaagaaagtctgttaaa

SEQ ID NO: 10402 - DNA, 33 bp, homo sapiens
gatgttaccattttaamtatagtgataacacag

SEQ ID NO: 10403 - DNA, 33 bp, homo sapiens
atgccagtggtgataayagggacagcagaagga

SEQ ID NO: 10404 - DNA, 33 bp, homo sapiens
gttaattctcctacaaygaatttgaagcaatac

SEQ ID NO: 10405 - DNA, 33 bp, homo sapiens
caaagcaacaattaacrgtgatatggctaactt

SEQ ID NO: 10406 - DNA, 33 bp, homo sapiens
tttgaccttctcacaaygtggcagctagattcc

SEQ ID NO: 10407 - DNA, 33 bp, homo sapiens
gagttatttggctttaraaaaccacacaacttg

SEQ ID NO: 10408 - DNA, 33 bp, homo sapiens
cagagaaaatcttcacrcttagtcctctttctt

SEQ ID NO: 10409 - DNA, 33 bp, homo sapiens
gtacttgttaggcatayggatcttagccaggca

SEQ ID NO: 10410 - DNA, 33 bp, homo sapiens
gctatgtaactacacartatgcacaccacagcc

SEQ ID NO: 10411 - DNA, 33 bp, homo sapiens
aagacactgcacaagcmaacagacaggaaggaa

SEQ ID NO: 10412 - DNA, 33 bp, homo sapiens
gctacagaaggaaatarccaaggcagctcaaaa

SEQ ID NO: 10413 - DNA, 33 bp, homo sapiens
agaaatcaacaaaacargatatctggataattc

SEQ ID NO: 10414 - DNA, 33 bp, homo sapiens
tattcctcactagatgrcagaaatcaatgctca

SEQ ID NO: 10415 - DNA, 33 bp, homo sapiens
cttgcgaccttgtttcrcattcacgatgcatgt

SEQ ID NO: 10416 - DNA, 33 bp, homo sapiens
accctttgcccttttayaatttggcttttatgt

SEQ ID NO: 10417 - DNA, 33 bp, homo sapiens
atgggacatgaggctargagagtgagttgagtc

SEQ ID NO: 10418 - DNA, 33 bp, homo sapiens
aaaataacgaacagagwatcccattcaggaaca

SEQ ID NO: 10419 - DNA, 33 bp, homo sapiens
tactagagtagacatasaacaatagaactgtat

SEQ ID NO: 10420 - DNA, 33 bp, homo sapiens
ctagatggcaattactsaagtttactgcttgtt

SEQ ID NO: 10421 - DNA, 33 bp, homo sapiens
tgaggccaagagttaaracgatcctgggaaaca

SEQ ID NO: 10422 - DNA, 33 bp, homo sapiens
ttatgttgtggtccaartaactctgagcttttc

SEQ ID NO: 10423 - DNA, 33 bp, homo sapiens
catggcctatggttgaraaattaattaaacagt

SEQ ID NO: 10424 - DNA, 33 bp, homo sapiens
gtgttaccaggtataamcacaggagctgaacat

SEQ ID NO: 10425 - DNA, 33 bp, homo sapiens
tacttcacgcacgttcrcacagaaaactttctg

SEQ ID NO: 10426 - DNA, 33 bp, homo sapiens
ttggatatgacttaaaygcttagcacaatttga

SEQ ID NO: 10427 - DNA, 33 bp, homo sapiens
cttggagcttggatgargagtatgtggagtgaa

SEQ ID NO: 10428 - DNA, 33 bp, homo sapiens
tgacctcagttgcccartatctatgttcctttt

SEQ ID NO: 10429 - DNA, 33 bp, homo sapiens
tgagattgcaaatttcyctctcatgaataattg

SEQ ID NO: 10430 - DNA, 33 bp, homo sapiens
ttaccagactaaaatcraggtattgttaggtta

SEQ ID NO: 10431 - DNA, 33 bp, homo sapiens
ctttaaattcagtttarcacttctaatatctaa

SEQ ID NO: 10432 - DNA, 33 bp, homo sapiens
caagcttcttctcagartaataactttcatagc

SEQ ID NO: 10433 - DNA, 33 bp, homo sapiens
aatctcctaatcctgarctgaagagttttagta

SEQ ID NO: 10434 - DNA, 33 bp, homo sapiens
atgttcttccatggctraaactaactttaatac

SEQ ID NO: 10435 - DNA, 33 bp, homo sapiens
aacacataagaaatgcwtactgattgcctgttt

SEQ ID NO: 10436 - DNA, 33 bp, homo sapiens
agagctccaataagaascagttttgataattaa

SEQ ID NO: 10437 - DNA, 33 bp, homo sapiens
acttaaatatgcacacrgtagatagaccctttt

SEQ ID NO: 10438 - DNA, 33 bp, homo sapiens
tgcaagtttggatttarctgagagcacagagag

SEQ ID NO: 10439 - DNA, 33 bp, homo sapiens
tgtacagtgtagtatcragctgggccttccatt

SEQ ID NO: 10440 - DNA, 33 bp, homo sapiens
cgatactacactgtacmctgattatgtttttat

SEQ ID NO: 10441 - DNA, 33 bp, homo sapiens
ccttcataataactacrctgaatggaccagata

SEQ ID NO: 10442 - DNA, 33 bp, homo sapiens
ctttgatgaacttaaamgtgaagtgaagacaag

SEQ ID NO: 10443 - DNA, 33 bp, homo sapiens
tgaggagtttctatcaraggctatgaagctgga

SEQ ID NO: 10444 - DNA, 33 bp, homo sapiens
agccctacaatattggratttgcgatttttcac

SEQ ID NO: 10445 - DNA, 33 bp, homo sapiens
tcaacatcttttccccygattcaccgtagtata

SEQ ID NO: 10446 - DNA, 33 bp, homo sapiens
tgactgactgacttatsaaaaacacataacata

SEQ ID NO: 10447 - DNA, 33 bp, homo sapiens
tggagaatattgaatawggagaaaaattacatg

SEQ ID NO: 10448 - DNA, 33 bp, homo sapiens
tacagagtaataaagcycacattttagcaaaat

SEQ ID NO: 10449 - DNA, 33 bp, homo sapiens
gtatttgctgaaaggayagagaggagaaggctg

SEQ ID NO: 10450 - DNA, 33 bp, homo sapiens
tatctttcagctatcartcttccaccttaacct

SEQ ID NO: 10451 - DNA, 33 bp, homo sapiens
gttcagatgacacatcrgagttgaatccagcgt

SEQ ID NO: 10452 - DNA, 33 bp, homo sapiens
tcacagataactatatyacatcaatctcctggt

SEQ ID NO: 10453 - DNA, 33 bp, homo sapiens
agcatggtgttttatayctgaccatgtttattc

SEQ ID NO: 10454 - DNA, 33 bp, homo sapiens
acacaggtgagtgaacragatactatcataaga

SEQ ID NO: 10455 - DNA, 33 bp, homo sapiens
ttctagaacaacctacyacttactttagagctt

SEQ ID NO: 10456 - DNA, 33 bp, homo sapiens
agacagtcattaaaggkatgcattccataaaga

SEQ ID NO: 10457 - DNA, 33 bp, homo sapiens
tttcaaggccactgttsaaagctatactcaaat

SEQ ID NO: 10458 - DNA, 33 bp, homo sapiens
aaggtgacatttacatyaagctctgaggcatgc

SEQ ID NO: 10459 - DNA, 33 bp, homo sapiens
caccaacaaatcttcckcttcctttagatctca

SEQ ID NO: 10460 - DNA, 33 bp, homo sapiens
agctactcttctagcaycatgttttgttttgtt

SEQ ID NO: 10461 - DNA, 33 bp, homo sapiens
tagtattggccatttcmaaaaacaccttctgga

SEQ ID NO: 10462 - DNA, 33 bp, homo sapiens
ctaacttgggagtggamcacaaaatctgatttt

SEQ ID NO: 10463 - DNA, 33 bp, homo sapiens
attaatttggcaaaagsactctgaaaaggggga

SEQ ID NO: 10464 - DNA, 33 bp, homo sapiens
gttgaaaatgatgaaaraagggaagattcttat

SEQ ID NO: 10465 - DNA, 33 bp, homo sapiens
cctcctcagtctgtcasgcccttttctctctgg

SEQ ID NO: 10466 - DNA, 33 bp, homo sapiens
gtctatgagaacaaaargaaaggaacaactttt

SEQ ID NO: 10467 - DNA, 33 bp, homo sapiens
tcaagggatagcctgamgttaaaatctttttaa

SEQ ID NO: 10468 - DNA, 33 bp, homo sapiens
aacacaattgtgccaartgtagctgcaacattt

SEQ ID NO: 10469 - DNA, 33 bp, homo sapiens
tatctttcttccagcaytaaatatctcaggaaa

SEQ ID NO: 10470 - DNA, 33 bp, homo sapiens
agaacaatggtacgaayaagaggccatagaaca

SEQ ID NO: 10471 - DNA, 33 bp, homo sapiens
ctttccccatccagcamgctatgttcaatgtgt

SEQ ID NO: 10472 - DNA, 33 bp, homo sapiens
cactcctcaaggctgaratgattaagatccata

SEQ ID NO: 10473 - DNA, 33 bp, homo sapiens
caaaggtagagaaaatmaagcatagaaaattgg

SEQ ID NO: 10474 - DNA, 33 bp, homo sapiens
atgaagtcacaagaaaytggtgaaattatgtat

SEQ ID NO: 10475 - DNA, 33 bp, homo sapiens
acaggagaaagtatcartagaacaggacatgtt

SEQ ID NO: 10476 - DNA, 33 bp, homo sapiens
aaaaaagcatgcccacracttgcaaagtacctc

SEQ ID NO: 10477 - DNA, 33 bp, homo sapiens
tagtcaagataaagtarcctgtacatagtaatc

SEQ ID NO: 10478 - DNA, 33 bp, homo sapiens
tacatttctgaaacaaygaatgaaatctaaatg

SEQ ID NO: 10479 - DNA, 33 bp, homo sapiens
tcttttcctatagatayggcttcctgtaagctg

SEQ ID NO: 10480 - DNA, 33 bp, homo sapiens
ttccccatgtgattcayattcttgcctctcagt

SEQ ID NO: 10481 - DNA, 33 bp, homo sapiens
ccagtatattattgggyaaatagcgggaactca

SEQ ID NO: 10482 - DNA, 33 bp, homo sapiens
cgagaaggacgactccragctgcctacaacctg

SEQ ID NO: 10483 - DNA, 33 bp, homo sapiens
gagaggctgttgctaakgatcccagagttgagc

SEQ ID NO: 10484 - DNA, 33 bp, homo sapiens
tgtgcctcgcatgcaaygtgtgtttaaataacc

SEQ ID NO: 10485 - DNA, 33 bp, homo sapiens
ctgggtcagacgatagyaaggatccctgtaagg

SEQ ID NO: 10486 - DNA, 33 bp, homo sapiens
ctgtcctatctctcacmatctgtggaagtgctt

SEQ ID NO: 10487 - DNA, 33 bp, homo sapiens
ttctgggaccccaacamatgagtgtgcaaagac

SEQ ID NO: 10488 - DNA, 33 bp, homo sapiens
tgtgagtagtatctgcrctgatattacagaacg

SEQ ID NO: 10489 - DNA, 33 bp, homo sapiens
attctaaattttttagycattagtcaactagtt

SEQ ID NO: 10490 - DNA, 33 bp, homo sapiens
agtttctgagtgccaasagtgttctctgtttta

SEQ ID NO: 10491 - DNA, 33 bp, homo sapiens
gacctcctgtaagaaasagggacatttcgattt

SEQ ID NO: 10492 - DNA, 33 bp, homo sapiens
gttacccatattctgcycccttcaaactccctt

SEQ ID NO: 10493 - DNA, 33 bp, homo sapiens
cccgtcatccttatcaygttggctatgggttta

SEQ ID NO: 10494 - DNA, 33 bp, homo sapiens
aactttaccaggtttcraagagcagaaagaggc

SEQ ID NO: 10495 - DNA, 33 bp, homo sapiens
taagatacattttggawcaatacaagaggaact

SEQ ID NO: 10496 - DNA, 33 bp, homo sapiens
aacaacaagaatcaacyataacatctatcaagt

SEQ ID NO: 10497 - DNA, 33 bp, homo sapiens
tagatccacatagaccrctaggtcaagagaaga

SEQ ID NO: 10498 - DNA, 33 bp, homo sapiens
ctgaaatgaagtcacartacagatgaaacactt

SEQ ID NO: 10499 - DNA, 33 bp, homo sapiens
tctcttgtttctactayaatacaggagttttgt

SEQ ID NO: 10500 - DNA, 33 bp, homo sapiens
tcaccaaagtggattaycaactttataacaaaa

SEQ ID NO: 10501 - DNA, 33 bp, homo sapiens
accttgtcctgggatcmgaaggcacttcacaca

SEQ ID NO: 10502 - DNA, 33 bp, homo sapiens
cataatcatctaaaaasgttcttagaggaaaat

SEQ ID NO: 10503 - DNA, 33 bp, homo sapiens
tgcactcctgtcccaamctcacagcaaacgcgt

SEQ ID NO: 10504 - DNA, 33 bp, homo sapiens
gttgagaggcaaacacrcagaaacaatggctag

SEQ ID NO: 10505 - DNA, 33 bp, homo sapiens
atgaactgagagcctaytacgggccggacttcg

SEQ ID NO: 10506 - DNA, 33 bp, homo sapiens
gcccagacacctacagmcatagagaagattctc

SEQ ID NO: 10507 - DNA, 33 bp, homo sapiens
catggactcagaactamcacataggatgaggtg

SEQ ID NO: 10508 - DNA, 33 bp, homo sapiens
ctcaaaggcaatgaacmaaacccagggctagac

SEQ ID NO: 10509 - DNA, 33 bp, homo sapiens
aagatcaaacaataaaygggtcctttatgacag

SEQ ID NO: 10510 - DNA, 33 bp, homo sapiens
agtttagacttgatggkcaatagaaatgctttg

SEQ ID NO: 10511 - DNA, 33 bp, homo sapiens
aaataagtgcaaataawacaatgttgaggaact

SEQ ID NO: 10512 - DNA, 33 bp, homo sapiens
cagcaaaataaaaaagsctgccaataccaagta

SEQ ID NO: 10513 - DNA, 33 bp, homo sapiens
tctgaaatactacccaktcagcccccagagtcc

SEQ ID NO: 10514 - DNA, 33 bp, homo sapiens
tgaaactttaaaggacwccctacagaatacaca

SEQ ID NO: 10515 - DNA, 33 bp, homo sapiens
tgctttctctgacagaygtaagggactggacac

SEQ ID NO: 10516 - DNA, 33 bp, homo sapiens
agagatcagtatacaasaactcagaaaagcaat

SEQ ID NO: 10517 - DNA, 33 bp, homo sapiens
acacaacagcagtaaasaaatatgacgtttaat

SEQ ID NO: 10518 - DNA, 33 bp, homo sapiens
attagtcctacaaaggmagtctattccccaggc

SEQ ID NO: 10519 - DNA, 33 bp, homo sapiens
gtgttggtggtttagcrcagaagacaggctcta

SEQ ID NO: 10520 - DNA, 33 bp, homo sapiens
agatttctcttccccarggaaaatgtatccacc

SEQ ID NO: 10521 - DNA, 33 bp, homo sapiens
ttttagttcttcctggyagttatttagccttgc

SEQ ID NO: 10522 - DNA, 33 bp, homo sapiens
atggttactggagatasagtgagctagggatct

SEQ ID NO: 10523 - DNA, 33 bp, homo sapiens
tctcatttgttcactayagagtaatacaagatt

SEQ ID NO: 10524 - DNA, 33 bp, homo sapiens
caggagaggccggagayggctgatcagcacaaa

SEQ ID NO: 10525 - DNA, 33 bp, homo sapiens
gcaatttgtttcaaaawggaactgtataatgtc

SEQ ID NO: 10526 - DNA, 33 bp, homo sapiens
agcctatctcaactgarcatttggtttaaatga

SEQ ID NO: 10527 - DNA, 33 bp, homo sapiens
gcttttgttctgtgtgyattaggtatttatgtt

SEQ ID NO: 10528 - DNA, 33 bp, homo sapiens
agtgatttgcttttgayaatcctgtgaggcagg

SEQ ID NO: 10529 - DNA, 33 bp, homo sapiens
gtctctggctaaaagaygacttatgataaataa

SEQ ID NO: 10530 - DNA, 33 bp, homo sapiens
tgaaatgatgccaacayataaaaatgataaata

SEQ ID NO: 10531 - DNA, 33 bp, homo sapiens
tatggaaaatagacacmgtacaaactcttcctc

SEQ ID NO: 10532 - DNA, 33 bp, homo sapiens
tgtctaaggtttcccartacaatcctatgtggc

SEQ ID NO: 10533 - DNA, 33 bp, homo sapiens
tgtatgcctgaacaccraagtcaccctcagtgg

SEQ ID NO: 10534 - DNA, 33 bp, homo sapiens
cccttgaggccatttcyaggctggttttgctgc

SEQ ID NO: 10535 - DNA, 33 bp, homo sapiens
tcactcttaaccactaygttgtgttgtcttaca

SEQ ID NO: 10536 - DNA, 33 bp, homo sapiens
ccttgtactattctggycactgcattttgagag

SEQ ID NO: 10537 - DNA, 33 bp, homo sapiens
tcaagctacagttctargaaattcaggctgaga

SEQ ID NO: 10538 - DNA, 33 bp, homo sapiens
ttcgtctgttggttaartcatgagactaattct

SEQ ID NO: 10539 - DNA, 33 bp, homo sapiens
agaatgaggattggtaygtatgcctgtttcatg

SEQ ID NO: 10540 - DNA, 33 bp, homo sapiens
tgctctctttatgaggkatgacaataaaggaaa

SEQ ID NO: 10541 - DNA, 33 bp, homo sapiens
catactcagctaaggawaataatagtcaaaaat

SEQ ID NO: 10542 - DNA, 33 bp, homo sapiens
gcctaacaacactctgmagctgagttctgtgtt

SEQ ID NO: 10543 - DNA, 33 bp, homo sapiens
tttagaacttagtaaasgtgggtggtcaaaata

SEQ ID NO: 10544 - DNA, 33 bp, homo sapiens
ttcgtgccaaaacatcrgagagactcatttcag

SEQ ID NO: 10545 - DNA, 33 bp, homo sapiens
atctttgttagcactamatctttgtcacctttg

SEQ ID NO: 10546 - DNA, 33 bp, homo sapiens
tgtggacctcaaaaccragaactacaaattgca

SEQ ID NO: 10547 - DNA, 33 bp, homo sapiens
gtagtgttgaaagaccwgctcacttctctctcc

SEQ ID NO: 10548 - DNA, 33 bp, homo sapiens
acttttaagttatttawagcttgcaataatttg

SEQ ID NO: 10549 - DNA, 33 bp, homo sapiens
tatgattgctaattcayatggttaagtgtatgt

SEQ ID NO: 10550 - DNA, 33 bp, homo sapiens
tcagtttcagtcttcartctttgacatcctttt

SEQ ID NO: 10551 - DNA, 33 bp, homo sapiens
aaggagaaaggacagamccccctatgcttagag

SEQ ID NO: 10552 - DNA, 33 bp, homo sapiens
cagagactgaaaacaasaattaacgccctctct

SEQ ID NO: 10553 - DNA, 33 bp, homo sapiens
gttggtgatcaaaccayctggcttttgtttttt

SEQ ID NO: 10554 - DNA, 33 bp, homo sapiens
atttgtgcaacttaggrcaaatgaactgtctac

SEQ ID NO: 10555 - DNA, 33 bp, homo sapiens
cctgttagatcacttgwaaatcttgttatagcc

SEQ ID NO: 10556 - DNA, 33 bp, homo sapiens
tgtgaaggtagctggcyagaccaatacagccca

SEQ ID NO: 10557 - DNA, 33 bp, homo sapiens
ttaggtagacaccatarcttcttattcagcttt

SEQ ID NO: 10558 - DNA, 33 bp, homo sapiens
atgaatgctaagtatcmaacaacctctagtgtt

SEQ ID NO: 10559 - DNA, 33 bp, homo sapiens
gacaatagacagttgayatagaaatgtatgaca

SEQ ID NO: 10560 - DNA, 33 bp, homo sapiens
gcatgataaatcagtayctctagcaattcacaa

SEQ ID NO: 10561 - DNA, 33 bp, homo sapiens
tattggctgaaaggaakaaaggaggtataattg

SEQ ID NO: 10562 - DNA, 33 bp, homo sapiens
agaaagtgttggaagcygaaatattttagtctg

SEQ ID NO: 10563 - DNA, 33 bp, homo sapiens
gcttccaccagctgatraaaatatgagtgaggg

SEQ ID NO: 10564 - DNA, 33 bp, homo sapiens
gaggctctcactagacrcattctcaatactgtc

SEQ ID NO: 10565 - DNA, 33 bp, homo sapiens
gccaccatgcccggtcraaaggccctttaggaa

SEQ ID NO: 10566 - DNA, 33 bp, homo sapiens
tttttgtttgtggttgragatgataataaaggg

SEQ ID NO: 10567 - DNA, 33 bp, homo sapiens
tcccagtggctgatccrccagactggccaaatt

SEQ ID NO: 10568 - DNA, 33 bp, homo sapiens
tttctgcctctagccargatggagtaataggga

SEQ ID NO: 10569 - DNA, 33 bp, homo sapiens
ttctgtcttttaaaaaygctgatctggtataag

SEQ ID NO: 10570 - DNA, 33 bp, homo sapiens
actgactgaaaatgaasagggatgctttggtca

SEQ ID NO: 10571 - DNA, 33 bp, homo sapiens
cctagttgagactctasataatgccacctgcat

SEQ ID NO: 10572 - DNA, 33 bp, homo sapiens
tcttccccagggttcartcatggaccacacaca

SEQ ID NO: 10573 - DNA, 33 bp, homo sapiens
aaattatttatttcaawccacctgtctgctagg

SEQ ID NO: 10574 - DNA, 33 bp, homo sapiens
acatctgtgcttttccyatgcaattttttttcc

SEQ ID NO: 10575 - DNA, 33 bp, homo sapiens
cttaatccagctgagayggaatgagaatggtgc

SEQ ID NO: 10576 - DNA, 33 bp, homo sapiens
tagttgttcttagacaygtgataatcataatat

SEQ ID NO: 10577 - DNA, 33 bp, homo sapiens
gtttactgaaagtggtyaaatgactgatagtat

SEQ ID NO: 10578 - DNA, 33 bp, homo sapiens
ttgctaaatatgtgaaygtaaatccaaaacagt

SEQ ID NO: 10579 - DNA, 33 bp, homo sapiens
atgcaaatgtgaataaracaagtttcttgttgt

SEQ ID NO: 10580 - DNA, 33 bp, homo sapiens
atggggtggatgaatamgttgtcaggtgtgata

SEQ ID NO: 10581 - DNA, 33 bp, homo sapiens
gaggtgagctctaaccrgaggatatagggggga

SEQ ID NO: 10582 - DNA, 33 bp, homo sapiens
tgcgaaatcaacactgycagtgaaaaacaaaca

SEQ ID NO: 10583 - DNA, 33 bp, homo sapiens
actttgtataattccaygtgacagactcaggtg

SEQ ID NO: 10584 - DNA, 33 bp, homo sapiens
aaaaaagaagagtccartgaaacaggcagagaa

SEQ ID NO: 10585 - DNA, 33 bp, homo sapiens
gcaaactaatgttctayaatttaggccttcagg

SEQ ID NO: 10586 - DNA, 33 bp, homo sapiens
aaatgcttggaagagaracaatgctctgtaaat

SEQ ID NO: 10587 - DNA, 33 bp, homo sapiens
tgttcgttttcttgcawcctatcaggtaggata

SEQ ID NO: 10588 - DNA, 33 bp, homo sapiens
taatccggaaacctgtyaaagacctcagagatc

SEQ ID NO: 10589 - DNA, 33 bp, homo sapiens
aataaagtgttgttgaygtttatgaaaccctta

SEQ ID NO: 10590 - DNA, 33 bp, homo sapiens
aatgccggttagatgaraggataacctacttaa

SEQ ID NO: 10591 - DNA, 33 bp, homo sapiens
tgtggccctcgcctgarcactctatccactttc

SEQ ID NO: 10592 - DNA, 33 bp, homo sapiens
ttgggctactatgcaasctacaggatgagagat

SEQ ID NO: 10593 - DNA, 33 bp, homo sapiens
accttgctgcttacacygctgatttcctggcac

SEQ ID NO: 10594 - DNA, 33 bp, homo sapiens
atctaaattctatgatyaagtagctgttgacaa

SEQ ID NO: 10595 - DNA, 33 bp, homo sapiens
atacagcctgactgaastattttggctaaacgt

SEQ ID NO: 10596 - DNA, 33 bp, homo sapiens
cctgctaacgagctaaygtttattccactataa

SEQ ID NO: 10597 - DNA, 33 bp, homo sapiens
actttacctagaacagracagacagaaaaaaca

SEQ ID NO: 10598 - DNA, 33 bp, homo sapiens
agaaagaatgcagaaarggtcttgatgaagaaa

SEQ ID NO: 10599 - DNA, 33 bp, homo sapiens
gtattatgctggtagtyactaattcgcgcttca

SEQ ID NO: 10600 - DNA, 33 bp, homo sapiens
cactgtgatataatccyagctgtagagagaagt

SEQ ID NO: 10601 - DNA, 33 bp, homo sapiens
agagtgactcatcttcrcaaaaagatacattaa

SEQ ID NO: 10602 - DNA, 33 bp, homo sapiens
caatgcatttgaaatawgttttctaagcattgt

SEQ ID NO: 10603 - DNA, 33 bp, homo sapiens
atttccatcataaatcygaaaccagtcaaacag

SEQ ID NO: 10604 - DNA, 33 bp, homo sapiens
gttgatgtaactgaackgactgagagacagagt

SEQ ID NO: 10605 - DNA, 33 bp, homo sapiens
gagtattgggtttgggratagttgatgtaactg

SEQ ID NO: 10606 - DNA, 33 bp, homo sapiens
gactattgttaactgcyccagatattttgaagg

SEQ ID NO: 10607 - DNA, 33 bp, homo sapiens
tgtcctagtgactgctraagaggatgatgtgag

SEQ ID NO: 10608 - DNA, 33 bp, homo sapiens
atgaatgaccaagagasaaaaatgatggacaaa

SEQ ID NO: 10609 - DNA, 33 bp, homo sapiens
tgaatgactaaataaaygagtttgtatgtcaag

SEQ ID NO: 10610 - DNA, 33 bp, homo sapiens
gcagctcacacttgaarggtgaagtttatgctc

SEQ ID NO: 10611 - DNA, 33 bp, homo sapiens
agagttttctgtatacyggagacctggaggcat

SEQ ID NO: 10612 - DNA, 33 bp, homo sapiens
tcttggaagaagatgayggaagtactttgttgt

SEQ ID NO: 10613 - DNA, 33 bp, homo sapiens
gagagccaaggaagaamgggtgaccaagccagt

SEQ ID NO: 10614 - DNA, 33 bp, homo sapiens
ttttgtcaccacaagasccaggcaagtcactac

SEQ ID NO: 10615 - DNA, 33 bp, homo sapiens
ctaagtagtattccacrgtatgcatcaaccaca

SEQ ID NO: 10616 - DNA, 33 bp, homo sapiens
acctatttctaattccrcaaaggagcctttacc

SEQ ID NO: 10617 - DNA, 33 bp, homo sapiens
caagatcagaacagaawtgaatagagactagga

SEQ ID NO: 10618 - DNA, 33 bp, homo sapiens
attcagcgtaaagtatmagagacattcttttca

SEQ ID NO: 10619 - DNA, 33 bp, homo sapiens
agtgctctctctgaaaygatttgggtaccaaac

SEQ ID NO: 10620 - DNA, 33 bp, homo sapiens
ttagaaggccaaaaccrcaactgaaatgacaca

SEQ ID NO: 10621 - DNA, 33 bp, homo sapiens
agtggactacaaagackataaagagagagttcc

SEQ ID NO: 10622 - DNA, 33 bp, homo sapiens
ttatgtgtggccaaagrctaaaggatggctaag

SEQ ID NO: 10623 - DNA, 33 bp, homo sapiens
caaaaagctgtgaaaaktgttgtgttctcaatg

SEQ ID NO: 10624 - DNA, 33 bp, homo sapiens
ctcatcagtgtgttccyattgcattttttcttt

SEQ ID NO: 10625 - DNA, 33 bp, homo sapiens
cagccatcatccattcrccctgcaggttcctct

SEQ ID NO: 10626 - DNA, 33 bp, homo sapiens
ggaaagtattaaataaygtagagagagtcacta

SEQ ID NO: 10627 - DNA, 33 bp, homo sapiens
cttgtagctttctttakagattgtggctaagac

SEQ ID NO: 10628 - DNA, 33 bp, homo sapiens
tctttgtcttatctgtsaatgggaacatggctg

SEQ ID NO: 10629 - DNA, 33 bp, homo sapiens
atactgcttaatccaakatctttttttgtgtgt

SEQ ID NO: 10630 - DNA, 33 bp, homo sapiens
tgaattgtcatcttcarctaagccaaccagaga

SEQ ID NO: 10631 - DNA, 33 bp, homo sapiens
atcccatatcgaaatgraaattgcaaatatgaa

SEQ ID NO: 10632 - DNA, 33 bp, homo sapiens
tatttcaaaaacctccrcagagctagcataata

SEQ ID NO: 10633 - DNA, 33 bp, homo sapiens
ggcagaattggtacagyatatctttggcattct

SEQ ID NO: 10634 - DNA, 33 bp, homo sapiens
gattgtcactcatccgycaaaaactctaaaatc

SEQ ID NO: 10635 - DNA, 33 bp, homo sapiens
tgtaactatttcacatratcagatgtcctcatt

SEQ ID NO: 10636 - DNA, 33 bp, homo sapiens
caaagaagagaggttcycagaagctaatatagg

SEQ ID NO: 10637 - DNA, 33 bp, homo sapiens
aaagtcattcttcttawctaatcaataaaagga

SEQ ID NO: 10638 - DNA, 33 bp, homo sapiens
ccataaacataaaggayaagttaggcatagagg

SEQ ID NO: 10639 - DNA, 33 bp, homo sapiens
atctgatgttgtgtcaygtttcactacatttaa

SEQ ID NO: 10640 - DNA, 33 bp, homo sapiens
tctacctaagcataccrctatccaaatatcact

SEQ ID NO: 10641 - DNA, 33 bp, homo sapiens
ggctcaagcaaatgcarctgtgaagatttactt

SEQ ID NO: 10642 - DNA, 33 bp, homo sapiens
atttttctcttttctgyaataggttaaggatcc

SEQ ID NO: 10643 - DNA, 33 bp, homo sapiens
gatatttttatctctamggtgaactactgaaat

SEQ ID NO: 10644 - DNA, 33 bp, homo sapiens
atggctacccctccatratgccaaaatatgcaa

SEQ ID NO: 10645 - DNA, 33 bp, homo sapiens
aacatagtctagtgacygccatctttttttgca

SEQ ID NO: 10646 - DNA, 33 bp, homo sapiens
gtgtcagaggttaatcraagacagaagttgggt

SEQ ID NO: 10647 - DNA, 33 bp, homo sapiens
aaggttaatgtatgaayatagagactgctactc

SEQ ID NO: 10648 - DNA, 33 bp, homo sapiens
attatcttacaaaacartgcataattaagcaca

SEQ ID NO: 10649 - DNA, 33 bp, homo sapiens
ttacctactagatgcaraacaattttaaaaata

SEQ ID NO: 10650 - DNA, 33 bp, homo sapiens
agggactgcaatatgartacttgacttatatct

SEQ ID NO: 10651 - DNA, 33 bp, homo sapiens
gtgggcaaggaatgtayagattgtttactattg

SEQ ID NO: 10652 - DNA, 33 bp, homo sapiens
atttttattaactgacyatatgccaatgtttat

SEQ ID NO: 10653 - DNA, 33 bp, homo sapiens
tccaattttttctgagsaccaacataatgcaac

SEQ ID NO: 10654 - DNA, 33 bp, homo sapiens
caaacatagaatgggtraagttaacattaggaa

SEQ ID NO: 10655 - DNA, 33 bp, homo sapiens
ctcagctcctgtaaatmaatagtcactacagaa

SEQ ID NO: 10656 - DNA, 33 bp, homo sapiens
cagacctttgaagttayggctcttcttgcttct

SEQ ID NO: 10657 - DNA, 33 bp, homo sapiens
cacccacaggctgtagrccactttttcacagaa

SEQ ID NO: 10658 - DNA, 33 bp, homo sapiens
gaaaagcaaagtataasaatggcttatactatc

SEQ ID NO: 10659 - DNA, 33 bp, homo sapiens
aagtatagtgtaggtawgtatagtatacagtgg

SEQ ID NO: 10660 - DNA, 33 bp, homo sapiens
tgccctttgggatgtamatttgagttattaata

SEQ ID NO: 10661 - DNA, 33 bp, homo sapiens
aaaatctgagctcttayacaggttagagatgtg

SEQ ID NO: 10662 - DNA, 33 bp, homo sapiens
ttgagatttagactggraagtaatagtctgaac

SEQ ID NO: 10663 - DNA, 33 bp, homo sapiens
actgtgaagaacactgmaaatggaatgatgagc

SEQ ID NO: 10664 - DNA, 33 bp, homo sapiens
gttttatcggaaaccaratatgtagatgagctc

SEQ ID NO: 10665 - DNA, 33 bp, homo sapiens
cttattgcttctatgckccacttttacttagac

SEQ ID NO: 10666 - DNA, 33 bp, homo sapiens
tgttgtatctgtgcaayaagccatactgtcatg

SEQ ID NO: 10667 - DNA, 33 bp, homo sapiens
cagagatataaatcaayacatgtaggctatacg

SEQ ID NO: 10668 - DNA, 33 bp, homo sapiens
ttgttgcagaatctcaratagacactgagtaaa

SEQ ID NO: 10669 - DNA, 33 bp, homo sapiens
cagtaagatgttcttcratctctgatattctct

SEQ ID NO: 10670 - DNA, 33 bp, homo sapiens
gaggattagatagctcrcattgcttttagatgg

SEQ ID NO: 10671 - DNA, 33 bp, homo sapiens
aattctcaatgaaatcraatataccgccactat

SEQ ID NO: 10672 - DNA, 33 bp, homo sapiens
ccacctatactattcastagctgagcacaatcc

SEQ ID NO: 10673 - DNA, 33 bp, homo sapiens
aagttcatctggacaayagtaaacaaactaaaa

SEQ ID NO: 10674 - DNA, 33 bp, homo sapiens
ttcagctaatcatcaakatgtgctttgttcatt

SEQ ID NO: 10675 - DNA, 33 bp, homo sapiens
tcctttatcagttacayattttacgaatacctt

SEQ ID NO: 10676 - DNA, 33 bp, homo sapiens
agcaaagtcaaaaaacrggattgcattaaacta

SEQ ID NO: 10677 - DNA, 33 bp, homo sapiens
taattttagctggtaargttttgaactggcctg

SEQ ID NO: 10678 - DNA, 33 bp, homo sapiens
tagaattcacttgctawctctaattctcacttc

SEQ ID NO: 10679 - DNA, 33 bp, homo sapiens
tggacatagtgttctakaccataagtttgcctt

SEQ ID NO: 10680 - DNA, 33 bp, homo sapiens
atttcattcttttgtckactcatcctttgtaat

SEQ ID NO: 10681 - DNA, 33 bp, homo sapiens
acatatggctttgtagkattctctggaggttta

SEQ ID NO: 10682 - DNA, 33 bp, homo sapiens
caatacagcagagtaaytgattgctagaaataa

SEQ ID NO: 10683 - DNA, 33 bp, homo sapiens
tttctgttagcaataargactgctcagctactt

SEQ ID NO: 10684 - DNA, 33 bp, homo sapiens
aataaaggctgacaacygagtaaaataaactta

SEQ ID NO: 10685 - DNA, 33 bp, homo sapiens
aaaattcgcttcagaamtctgtgttgctcggga

SEQ ID NO: 10686 - DNA, 33 bp, homo sapiens
tggagatgatgtagtamaaaaaaatagcagtct

SEQ ID NO: 10687 - DNA, 33 bp, homo sapiens
tctttgacacaggcttwaaaaaaataaagaaag

SEQ ID NO: 10688 - DNA, 33 bp, homo sapiens
agacatttcctagctayattctattgttcattt

SEQ ID NO: 10689 - DNA, 33 bp, homo sapiens
attattgattatcaaakaaagcctgtgaatgga

SEQ ID NO: 10690 - DNA, 33 bp, homo sapiens
ggaaaacacaatcacarctagctttaagggaac

SEQ ID NO: 10691 - DNA, 33 bp, homo sapiens
tagttccattctaggakattttttgaagatttc

SEQ ID NO: 10692 - DNA, 33 bp, homo sapiens
ttctccacaagataaaygcactatactaatttg

SEQ ID NO: 10693 - DNA, 33 bp, homo sapiens
tctatgtcaccaattartaacttgttgccagat

SEQ ID NO: 10694 - DNA, 33 bp, homo sapiens
tatctcccctagtttaygttgtgtctgtcccag

SEQ ID NO: 10695 - DNA, 33 bp, homo sapiens
caaacaccgataattayagcaaactactacagc

SEQ ID NO: 10696 - DNA, 33 bp, homo sapiens
cctagatatcttggctraaaggactctgtctcc

SEQ ID NO: 10697 - DNA, 33 bp, homo sapiens
cagagggtctaatcacrctgacgaagcttcctc

SEQ ID NO: 10698 - DNA, 33 bp, homo sapiens
gttgtttgcaaacgtaygcagagtggtgaaaat

SEQ ID NO: 10699 - DNA, 33 bp, homo sapiens
agaaaagtaagactagmccaagaagaacaaaag

SEQ ID NO: 10700 - DNA, 33 bp, homo sapiens
tttaccaaataaccagsatgattcaaataagca

SEQ ID NO: 10701 - DNA, 33 bp, homo sapiens
tgtttcagtcagtgggycaccaattagtgagca

SEQ ID NO: 10702 - DNA, 33 bp, homo sapiens
tgcttttgcgtacactmacttttattttacttt

SEQ ID NO: 10703 - DNA, 33 bp, homo sapiens
acaaaagtcaggggagwctcatccagcctggtt

SEQ ID NO: 10704 - DNA, 33 bp, homo sapiens
tctggggactgaaggamaatggcactcttttca

SEQ ID NO: 10705 - DNA, 33 bp, homo sapiens
acatacgctcatttgayggacacactgtggcac

SEQ ID NO: 10706 - DNA, 33 bp, homo sapiens
gatttaaagtagtcagwcatcctccatcacaca

SEQ ID NO: 10707 - DNA, 33 bp, homo sapiens
taaagttacagtgagayaggtgtgaatgtacaa

SEQ ID NO: 10708 - DNA, 33 bp, homo sapiens
atttcttgcagttcaaygagtacagtatttcaa

SEQ ID NO: 10709 - DNA, 33 bp, homo sapiens
tctttggattgaaagamataaagtacagcatat

SEQ ID NO: 10710 - DNA, 33 bp, homo sapiens
ggatattggtcattaawacctttctaacttaat

SEQ ID NO: 10711 - DNA, 33 bp, homo sapiens
gaaggaattggccttayggttgacagacaagcc

SEQ ID NO: 10712 - DNA, 33 bp, homo sapiens
cttttcttcatcctacyctgatgagattttctg

SEQ ID NO: 10713 - DNA, 33 bp, homo sapiens
tctataatccatagcarcttccacctgtacttt

SEQ ID NO: 10714 - DNA, 33 bp, homo sapiens
ctctttaataaagatcrataagctggtcaaaat

SEQ ID NO: 10715 - DNA, 33 bp, homo sapiens
tgctgtatagttctccratttgtgaaatcatca

SEQ ID NO: 10716 - DNA, 33 bp, homo sapiens
caagaaaggaagagcaraaggaggatgaacaca

SEQ ID NO: 10717 - DNA, 33 bp, homo sapiens
cccaaaatcctatagcrgagaaggctggtgttt

SEQ ID NO: 10718 - DNA, 33 bp, homo sapiens
gcttttcctttcaagayggacctgctgattcag

SEQ ID NO: 10719 - DNA, 33 bp, homo sapiens
gggcaacctcctctgcygaaggggaaatagtcc

SEQ ID NO: 10720 - DNA, 33 bp, homo sapiens
atgtcagctgccatcaytccttatggaaaaccc

SEQ ID NO: 10721 - DNA, 33 bp, homo sapiens
aaggacttcatacgtgmaatgctcccccttttc

SEQ ID NO: 10722 - DNA, 33 bp, homo sapiens
ttgactatatgtatccrgctttatttctgggtt

SEQ ID NO: 10723 - DNA, 33 bp, homo sapiens
agttataagacattcayatcttcagccttagta

SEQ ID NO: 10724 - DNA, 33 bp, homo sapiens
agccgaggaatcatggyaagcaggtagagaggg

SEQ ID NO: 10725 - DNA, 33 bp, homo sapiens
caagaggtaggtggaartgtctcataggataca

SEQ ID NO: 10726 - DNA, 33 bp, homo sapiens
aggccagtgttcactgraaagagatgaggtcag

SEQ ID NO: 10727 - DNA, 33 bp, homo sapiens
ttaaggcacttggcaayggatcgagagatgtat

SEQ ID NO: 10728 - DNA, 33 bp, homo sapiens
aacaaacaaaaccactkaccaaattgatgcata

SEQ ID NO: 10729 - DNA, 33 bp, homo sapiens
gaacaagaatatgcaasaataagaaaaagttct

SEQ ID NO: 10730 - DNA, 33 bp, homo sapiens
ttaatatttgtggtagragttttgtaaacagaa

SEQ ID NO: 10731 - DNA, 33 bp, homo sapiens
atctacattctgttctraagaaatcagatgaga

SEQ ID NO: 10732 - DNA, 33 bp, homo sapiens
aactcttttggaggacrctagaggtctttgcta

SEQ ID NO: 10733 - DNA, 33 bp, homo sapiens
cagttaggaagaaaccragagagtagtgtacta

SEQ ID NO: 10734 - DNA, 33 bp, homo sapiens
agaaagaatggcggcaraagtacagtcaataag

SEQ ID NO: 10735 - DNA, 33 bp, homo sapiens
atagtaatgctctttargaggtagctcaaacct

SEQ ID NO: 10736 - DNA, 33 bp, homo sapiens
attaagtttcccatagsatgaatgtgcaagaat

SEQ ID NO: 10737 - DNA, 33 bp, homo sapiens
caacagtaataacagaygaactaagtatattca

SEQ ID NO: 10738 - DNA, 33 bp, homo sapiens
tcttttggtggagagakaaaaacacctcatttc

SEQ ID NO: 10739 - DNA, 33 bp, homo sapiens
tttgcctataaatgcawcatggaatctttttga

SEQ ID NO: 10740 - DNA, 33 bp, homo sapiens
atggtatcagatggaasacagactgaatcttta

SEQ ID NO: 10741 - DNA, 33 bp, homo sapiens
atactccagtcatgccsatcattcctatacata

SEQ ID NO: 10742 - DNA, 33 bp, homo sapiens
aattaaactgtttctarggtcaataaaaacatt

SEQ ID NO: 10743 - DNA, 33 bp, homo sapiens
atggatgcagctaaaawgctagaaataaagcca

SEQ ID NO: 10744 - DNA, 33 bp, homo sapiens
cattaaaatatctcacraaaaggttcttaattc

SEQ ID NO: 10745 - DNA, 33 bp, homo sapiens
ctcctactgggtagcascattcatctctgtccc

SEQ ID NO: 10746 - DNA, 33 bp, homo sapiens
aaactgatgacactggrcaacctctttagagtc

SEQ ID NO: 10747 - DNA, 33 bp, homo sapiens
tcagaggctctctttasgggacagctctatttc

SEQ ID NO: 10748 - DNA, 33 bp, homo sapiens
ttctccaccaagctgaraaagtaagccaagaaa

SEQ ID NO: 10749 - DNA, 33 bp, homo sapiens
gccactggaatggcacmacagctagggatttaa

SEQ ID NO: 10750 - DNA, 33 bp, homo sapiens
accctgggtgttgctgmagaaaaacctcacatc

SEQ ID NO: 10751 - DNA, 33 bp, homo sapiens
ctgtgtgatcggtgccraaacttggagatgggt

SEQ ID NO: 10752 - DNA, 33 bp, homo sapiens
agttggtccaagttaaytgttgataatatcagg

SEQ ID NO: 10753 - DNA, 33 bp, homo sapiens
aaaattaaccctgtgcratggcgtgggcctgta

SEQ ID NO: 10754 - DNA, 33 bp, homo sapiens
aatatacaaattagaarcccaaaattgtcagag

SEQ ID NO: 10755 - DNA, 33 bp, homo sapiens
gttttacaagactcaaratgttggctggtagaa

SEQ ID NO: 10756 - DNA, 33 bp, homo sapiens
aggagagaggacttcaraagaaaattacttctg

SEQ ID NO: 10757 - DNA, 33 bp, homo sapiens
tgcagctttctatggcrgagaacaacaaacagg

SEQ ID NO: 10758 - DNA, 33 bp, homo sapiens
gtagtgcttctaaacasagaaggatgagatgac

SEQ ID NO: 10759 - DNA, 33 bp, homo sapiens
ttggaaaaccatgagtsaaagtaacacatcaat

SEQ ID NO: 10760 - DNA, 33 bp, homo sapiens
aagaaaacaagtagaaratacagtcccaactta

SEQ ID NO: 10761 - DNA, 33 bp, homo sapiens
ttttgggtaaaaggaaygttggctctgtttctc

SEQ ID NO: 10762 - DNA, 33 bp, homo sapiens
atgaggttgcataaacraattgcagatagtaaa

SEQ ID NO: 10763 - DNA, 33 bp, homo sapiens
attaactatagtcactracctacattttctttt

SEQ ID NO: 10764 - DNA, 33 bp, homo sapiens
gctccaaagcacttgcycttacccaccacaatt

SEQ ID NO: 10765 - DNA, 33 bp, homo sapiens
taggggagaagattgaraagaaagcctattatt

SEQ ID NO: 10766 - DNA, 33 bp, homo sapiens
aacaaagacttaaagawgttgaggaccagtgaa

SEQ ID NO: 10767 - DNA, 33 bp, homo sapiens
gatctttaactcctggmagctactactctgttc

SEQ ID NO: 10768 - DNA, 33 bp, homo sapiens
aactctgaccataaaarttgacaagagtgggca

SEQ ID NO: 10769 - DNA, 33 bp, homo sapiens
tgatggggaattagccyaagactaactgcttct

SEQ ID NO: 10770 - DNA, 33 bp, homo sapiens
tatccatccaattgctsaagagtgatctatttt

SEQ ID NO: 10771 - DNA, 33 bp, homo sapiens
aaaaggcgtgaacttcmcaaaagatgaaggggg

SEQ ID NO: 10772 - DNA, 33 bp, homo sapiens
ctctgtgccaaaagccygaaattatggtctaat

SEQ ID NO: 10773 - DNA, 33 bp, homo sapiens
cagcctgtgggccctaygtgcagttctgtcaca

SEQ ID NO: 10774 - DNA, 33 bp, homo sapiens
cccaattgtggtcaagkctgtgaacagttggtt

SEQ ID NO: 10775 - DNA, 33 bp, homo sapiens
ggtaaccattatcagakagaaggcaggtggtac

SEQ ID NO: 10776 - DNA, 33 bp, homo sapiens
gtaatagcaccgaaagmaaataaaatgggcata

SEQ ID NO: 10777 - DNA, 33 bp, homo sapiens
tcttctgaacacgattyaaattttgttcaaagt

SEQ ID NO: 10778 - DNA, 33 bp, homo sapiens
cttgcatagcttaaaaygaagtgctctgttaaa

SEQ ID NO: 10779 - DNA, 33 bp, homo sapiens
tataaactttcagttaycagatgagcaaattct

SEQ ID NO: 10780 - DNA, 33 bp, homo sapiens
agataaccgaagctaaytgaccacatcctactt

SEQ ID NO: 10781 - DNA, 33 bp, homo sapiens
aaccacgttcaaaggamggagaaagatgttgct

SEQ ID NO: 10782 - DNA, 33 bp, homo sapiens
tacttaaaatcacttgraatttgttgccgtgtg

SEQ ID NO: 10783 - DNA, 33 bp, homo sapiens
tttgatttttgagtcaygtatctcatttgagca

SEQ ID NO: 10784 - DNA, 33 bp, homo sapiens
atgatagcgtttatctyactgcactgagaatgt

SEQ ID NO: 10785 - DNA, 33 bp, homo sapiens
attagcataaccagtarcttgtagatatcatag

SEQ ID NO: 10786 - DNA, 33 bp, homo sapiens
ccatttctgtctctgtraatggcacctcctgga

SEQ ID NO: 10787 - DNA, 33 bp, homo sapiens
acaaggtggacttgackgcattatcaattcttt

SEQ ID NO: 10788 - DNA, 33 bp, homo sapiens
caagtatcagctcctckaggaaagcatccttgt

SEQ ID NO: 10789 - DNA, 33 bp, homo sapiens
tggaggagctctgaagsaaaagcgtgggaaaag

SEQ ID NO: 10790 - DNA, 33 bp, homo sapiens
cagtaactggcatatayagtcagctctccatat

SEQ ID NO: 10791 - DNA, 33 bp, homo sapiens
gaagtactgctttagcrcactgtcatgattctt

SEQ ID NO: 10792 - DNA, 33 bp, homo sapiens
cacactcggtcatcccyacatccaatcagtcat

SEQ ID NO: 10793 - DNA, 33 bp, homo sapiens
aaggaaaatgaagtcasggaagaatgaaaaagt

SEQ ID NO: 10794 - DNA, 33 bp, homo sapiens
aacaaaagcagtgtaamccttccatattgcaga

SEQ ID NO: 10795 - DNA, 33 bp, homo sapiens
tcttgtaaggaaaaaaygtaaatgcataaaaac

SEQ ID NO: 10796 - DNA, 33 bp, homo sapiens
aactctttacaaaatcrccagaaaaagattaat

SEQ ID NO: 10797 - DNA, 33 bp, homo sapiens
gccgctgaagaagccartgatttatacgtaggt

SEQ ID NO: 10798 - DNA, 33 bp, homo sapiens
tctttttatcctgcaawtctatcaaacaggatc

SEQ ID NO: 10799 - DNA, 33 bp, homo sapiens
gaggtctaacttagacraaacggtcaggaagtt

SEQ ID NO: 10800 - DNA, 33 bp, homo sapiens
tgtaaaagtatgtttcyctatagacacgtccta

SEQ ID NO: 10801 - DNA, 33 bp, homo sapiens
cctctaactagactgarcagaatcagaaatcaa

SEQ ID NO: 10802 - DNA, 33 bp, homo sapiens
ggaaataaatatttgcygagagccttctttgtg

SEQ ID NO: 10803 - DNA, 33 bp, homo sapiens
ccccccagaggtatgaycacagctacaactaag

SEQ ID NO: 10804 - DNA, 33 bp, homo sapiens
gtgacatgacaaagaasaaggactgagatacat

SEQ ID NO: 10805 - DNA, 33 bp, homo sapiens
cacttatccatttcccratgaaacagtgctcta

SEQ ID NO: 10806 - DNA, 33 bp, homo sapiens
ttagagggttctcttayggttcactctctacat

SEQ ID NO: 10807 - DNA, 33 bp, homo sapiens
gattcaacctttgcccrgatatctttcttaatt

SEQ ID NO: 10808 - DNA, 33 bp, homo sapiens
taaagagcaacaactayaaaatgcctattcacc

SEQ ID NO: 10809 - DNA, 33 bp, homo sapiens
tgtctcagtgaaatatsaccctcggcccatatt

SEQ ID NO: 10810 - DNA, 33 bp, homo sapiens
aatccacaactaaatasctctcgttcagacatt

SEQ ID NO: 10811 - DNA, 33 bp, homo sapiens
gaggagtcagttaataygtgtaaaagttttaga

SEQ ID NO: 10812 - DNA, 33 bp, homo sapiens
catagatggcacagackggggcttttcagccca

SEQ ID NO: 10813 - DNA, 33 bp, homo sapiens
cagggtcactcttcaastaagagcagagttggg

SEQ ID NO: 10814 - DNA, 33 bp, homo sapiens
ggtggttaacagttcayatctgaagtcatactg

SEQ ID NO: 10815 - DNA, 33 bp, homo sapiens
ttggtatagaatcggcyctatgttgtgttttgc

SEQ ID NO: 10816 - DNA, 33 bp, homo sapiens
acagcaacctgaatccmaccagcctttgtccaa

SEQ ID NO: 10817 - DNA, 33 bp, homo sapiens
agaagccagatttcggrcaaggtagaacgtgag

SEQ ID NO: 10818 - DNA, 33 bp, homo sapiens
aagaatacacatctccrccacaccgcattgcct

SEQ ID NO: 10819 - DNA, 33 bp, homo sapiens
actgagcttagcaatcyccaacgtattgatttt

SEQ ID NO: 10820 - DNA, 33 bp, homo sapiens
tgcaatggcagcttacrggggtataggcagtgc

SEQ ID NO: 10821 - DNA, 33 bp, homo sapiens
aggtctcacaccaaagsctgatgaaaccccaaa

SEQ ID NO: 10822 - DNA, 33 bp, homo sapiens
ttatccacatggataaytggaagaaattgtccc

SEQ ID NO: 10823 - DNA, 33 bp, homo sapiens
gcccctgtgcattaaayattcacccaaaggact

SEQ ID NO: 10824 - DNA, 33 bp, homo sapiens
catcttgcattatcccrgcagagcctaaatcca

SEQ ID NO: 10825 - DNA, 33 bp, homo sapiens
tctctgctgccttccaraaaacacaatcaaggt

SEQ ID NO: 10826 - DNA, 33 bp, homo sapiens
ctaaggctttggcacakaatatcagttgccctc

SEQ ID NO: 10827 - DNA, 33 bp, homo sapiens
atgctcccagttgtcakatctttacccaagaag

SEQ ID NO: 10828 - DNA, 33 bp, homo sapiens
ttgccagacagatcaakctaagctaccactctt

SEQ ID NO: 10829 - DNA, 33 bp, homo sapiens
gatgtttcgagttactraaagacagcacattga

SEQ ID NO: 10830 - DNA, 33 bp, homo sapiens
aatgcctttgagccatragatgtaagctggcaa

SEQ ID NO: 10831 - DNA, 33 bp, homo sapiens
tgaggtaggcatttcamaagcatgggttgaatg

SEQ ID NO: 10832 - DNA, 33 bp, homo sapiens
gaacgggctgtagcaartgtacatagtgggaat

SEQ ID NO: 10833 - DNA, 33 bp, homo sapiens
gagaaattgagagctcmaaacaccagccaaatt

SEQ ID NO: 10834 - DNA, 33 bp, homo sapiens
ggctccaataaagtcayctgctcaaagtcacac

SEQ ID NO: 10835 - DNA, 33 bp, homo sapiens
tttttgtttatcccacygcatggtaggcaatgg

SEQ ID NO: 10836 - DNA, 33 bp, homo sapiens
caaataaggccgatgayaggaggtaagaggtca

SEQ ID NO: 10837 - DNA, 33 bp, homo sapiens
atcaacttgattgacarctcagtgtaaagtggt

SEQ ID NO: 10838 - DNA, 33 bp, homo sapiens
gataacactgagtcacragtattcacagtctga

SEQ ID NO: 10839 - DNA, 33 bp, homo sapiens
gtgacttaagacgacarcaatcttaaaacaaca

SEQ ID NO: 10840 - DNA, 33 bp, homo sapiens
gaatcatttgtgaatamctacagtgtgcagggc

SEQ ID NO: 10841 - DNA, 33 bp, homo sapiens
atacaagccacaatackgatgaatctcaaaaac

SEQ ID NO: 10842 - DNA, 33 bp, homo sapiens
aaaacagggccaataastaaggtgcaattaaca

SEQ ID NO: 10843 - DNA, 33 bp, homo sapiens
caagctctgccgacacygtaatagtcatttgaa

SEQ ID NO: 10844 - DNA, 33 bp, homo sapiens
atttcctccaacaacargtaggattcccccgac

SEQ ID NO: 10845 - DNA, 33 bp, homo sapiens
tacaccaaataagaacracacatatcataggct

SEQ ID NO: 10846 - DNA, 33 bp, homo sapiens
tcctgaccccagttagkccgggaatgatctggc

SEQ ID NO: 10847 - DNA, 33 bp, homo sapiens
gataatataatgtcaartgatgatgaggactct

SEQ ID NO: 10848 - DNA, 33 bp, homo sapiens
ttctcctggaaagggayagattggtgctgcctg

SEQ ID NO: 10849 - DNA, 33 bp, homo sapiens
ggtggtggagacagcayatacaaagagtgagaa

SEQ ID NO: 10850 - DNA, 33 bp, homo sapiens
caggtatgaggtaccaygctcggctggcagtgc

SEQ ID NO: 10851 - DNA, 33 bp, homo sapiens
ttggcagggcagagtgycaaatagaagagagca

SEQ ID NO: 10852 - DNA, 33 bp, homo sapiens
cttccaagctagctggyatttgatttcagatgc

SEQ ID NO: 10853 - DNA, 33 bp, homo sapiens
acagtgctttcttatcrcttagaatttttgttt

SEQ ID NO: 10854 - DNA, 33 bp, homo sapiens
cctcagggcctatcacrgtcccaaatatgtgac

SEQ ID NO: 10855 - DNA, 33 bp, homo sapiens
tggcctggacagctgtraaaagtggagaagaca

SEQ ID NO: 10856 - DNA, 33 bp, homo sapiens
ctctaaagagacagacraacaggaagagagtca

SEQ ID NO: 10857 - DNA, 33 bp, homo sapiens
ctggagaggacgtgttraaacctttcctgtgag

SEQ ID NO: 10858 - DNA, 33 bp, homo sapiens
gcatttttccatatcckcattttgtttgttgtt

SEQ ID NO: 10859 - DNA, 33 bp, homo sapiens
gtaccacaggtaacggkcatctggtcctccatt

SEQ ID NO: 10860 - DNA, 33 bp, homo sapiens
tttcctacttctccaargtgttggaaattgatt

SEQ ID NO: 10861 - DNA, 33 bp, homo sapiens
gcttagagcacaaacakgtacacatctggcctc

SEQ ID NO: 10862 - DNA, 33 bp, homo sapiens
gcaacacctaaacaaarggagttgatgcctccg

SEQ ID NO: 10863 - DNA, 33 bp, homo sapiens
ccacagccataagatcrcactgaggactacagg

SEQ ID NO: 10864 - DNA, 33 bp, homo sapiens
aaactggaacctacgayataggattgatgtaag

SEQ ID NO: 10865 - DNA, 33 bp, homo sapiens
atttgccagcatttgaygtgatgcttcatggtt

SEQ ID NO: 10866 - DNA, 33 bp, homo sapiens
atttcagattgagctakagggggatactgggca

SEQ ID NO: 10867 - DNA, 33 bp, homo sapiens
tgtatttgagcccacaratatctactgagcacc

SEQ ID NO: 10868 - DNA, 33 bp, homo sapiens
atcacagagtagaaaartctgcagtccccagaa

SEQ ID NO: 10869 - DNA, 33 bp, homo sapiens
acattctctgtgggcaytcgttgattggaggtt

SEQ ID NO: 10870 - DNA, 33 bp, homo sapiens
ggggtcagcccagacargagatacccacaaact

SEQ ID NO: 10871 - DNA, 33 bp, homo sapiens
gagcagctgttgtacaygaaaggtttctataaa

SEQ ID NO: 10872 - DNA, 33 bp, homo sapiens
gctaaatacatgaagaygctctatttaatcctc

SEQ ID NO: 10873 - DNA, 33 bp, homo sapiens
gactggcttaaactgawcaagactcagtttctg

SEQ ID NO: 10874 - DNA, 33 bp, homo sapiens
aagctcaagaaatatcrgaggaggtgtctggca

SEQ ID NO: 10875 - DNA, 33 bp, homo sapiens
ggcccataaatcccccsagagagagatggaagg

SEQ ID NO: 10876 - DNA, 33 bp, homo sapiens
aaagctaggagtgtccycgaaatgtgggtggta

SEQ ID NO: 10877 - DNA, 33 bp, homo sapiens
ttaaaaatacatacctraattccaacatttctc

SEQ ID NO: 10878 - DNA, 33 bp, homo sapiens
ttatggtcgggagatascatcatttaagaagca

SEQ ID NO: 10879 - DNA, 33 bp, homo sapiens
ctgggttgatttctgcyaggaatcccgcaggct

SEQ ID NO: 10880 - DNA, 33 bp, homo sapiens
ggaacacacacagggasaaatgacaggcaaata

SEQ ID NO: 10881 - DNA, 33 bp, homo sapiens
tcccagtaagtgccccsgagattccagacccac

SEQ ID NO: 10882 - DNA, 33 bp, homo sapiens
acacacagaatgccacygtctttaaccacaggt

SEQ ID NO: 10883 - DNA, 33 bp, homo sapiens
catgaagttcacaatcrcggcccttagtgtgcc

SEQ ID NO: 10884 - DNA, 33 bp, homo sapiens
tgaaagttgatatgacyagacattttacaaata

SEQ ID NO: 10885 - DNA, 33 bp, homo sapiens
cccaattaaaagtatcyttgcagttttccttaa

SEQ ID NO: 10886 - DNA, 33 bp, homo sapiens
caatattgaaaactaartagcaaaaagaggtca

SEQ ID NO: 10887 - DNA, 33 bp, homo sapiens
gtgaccatgttatacartgatgatctagatgtg

SEQ ID NO: 10888 - DNA, 33 bp, homo sapiens
atattacttcttcttasagtgtctctgcagtag

SEQ ID NO: 10889 - DNA, 33 bp, homo sapiens
tttgggagattttacartgctactaatattcgc

SEQ ID NO: 10890 - DNA, 33 bp, homo sapiens
atttatagcattgtaartattctcctagttata

SEQ ID NO: 10891 - DNA, 33 bp, homo sapiens
tagaacatgaaaggccmagattcaggaaagaag

SEQ ID NO: 10892 - DNA, 33 bp, homo sapiens
agaaatagtaattaacrcaatgcatacaaactg

SEQ ID NO: 10893 - DNA, 33 bp, homo sapiens
agggtaacaggtgaccrcagacatcaaggcatt

SEQ ID NO: 10894 - DNA, 33 bp, homo sapiens
aattacatggttatgcrcccttttttgcaccat

SEQ ID NO: 10895 - DNA, 33 bp, homo sapiens
tgtctggaactatttcraagacaaataaatata

SEQ ID NO: 10896 - DNA, 33 bp, homo sapiens
aaagcacatgagatgayaatgcttcttcaattt

SEQ ID NO: 10897 - DNA, 33 bp, homo sapiens
tgtgactcaagaatagsaaatgagagcacagaa

SEQ ID NO: 10898 - DNA, 33 bp, homo sapiens
aagatgacatactcccrggcttcgggtacaatg

SEQ ID NO: 10899 - DNA, 33 bp, homo sapiens
gttgggcattgtcttasacgtttactagccatt

SEQ ID NO: 10900 - DNA, 33 bp, homo sapiens
gccaggagaagcctcaktagcagttactggttc

SEQ ID NO: 10901 - DNA, 33 bp, homo sapiens
atcacatgtgtagattyaatatgatatgtttgt

SEQ ID NO: 10902 - DNA, 33 bp, homo sapiens
aaaaaatgctattacaraaaagatgatcctttc

SEQ ID NO: 10903 - DNA, 33 bp, homo sapiens
agttgggaggctgatcragtgaatgaatgtgaa

SEQ ID NO: 10904 - DNA, 33 bp, homo sapiens
gaactctgaacctacartcttcgtgagcttggg

SEQ ID NO: 10905 - DNA, 33 bp, homo sapiens
tatggccaagtagtccyaaccctgcttttacca

SEQ ID NO: 10906 - DNA, 33 bp, homo sapiens
ggtggcagtgatgctaycttctactcactggct

SEQ ID NO: 10907 - DNA, 33 bp, homo sapiens
cagtcagcgctatctcratctttgatgtctggg

SEQ ID NO: 10908 - DNA, 33 bp, homo sapiens
ccaatacaagtgaaaaytgtagtgtccttaaaa

SEQ ID NO: 10909 - DNA, 33 bp, homo sapiens
tctgatttaagctacarataatatcctgttcta

SEQ ID NO: 10910 - DNA, 33 bp, homo sapiens
agcactgaggtaataaygcaacatctaggctta

SEQ ID NO: 10911 - DNA, 33 bp, homo sapiens
atgcggggcaaagccaygagacgaccagggtgc

SEQ ID NO: 10912 - DNA, 33 bp, homo sapiens
atacaatgtctaacacraatacgttgtctaaca

SEQ ID NO: 10913 - DNA, 33 bp, homo sapiens
aaccagaaactagagaygcctgcgaggagctga

SEQ ID NO: 10914 - DNA, 33 bp, homo sapiens
ctttccctggattttaygtgtgtctctgagaag

SEQ ID NO: 10915 - DNA, 33 bp, homo sapiens
acacaggatgggacaaygtgaccacagtggatg

SEQ ID NO: 10916 - DNA, 33 bp, homo sapiens
tattgctcaactaagcwacttcggtaatcatgc

SEQ ID NO: 10917 - DNA, 33 bp, homo sapiens
ccactgttctatgttcyctccttgcttaagtta

SEQ ID NO: 10918 - DNA, 33 bp, homo sapiens
agtcaatattcccagtkactcatttgaccatgg

SEQ ID NO: 10919 - DNA, 33 bp, homo sapiens
agttaattttcaggcarcccctatgagtcaatt

SEQ ID NO: 10920 - DNA, 33 bp, homo sapiens
catcgatggacacagcygacaaatctctgcatg

SEQ ID NO: 10921 - DNA, 33 bp, homo sapiens
gaatacaattcaataartaagatcagggcgcta

SEQ ID NO: 10922 - DNA, 33 bp, homo sapiens
ccacagcaagagggggracagacaagtggccct

SEQ ID NO: 10923 - DNA, 33 bp, homo sapiens
catggtaattaacccaycacgtctttctgatca

SEQ ID NO: 10924 - DNA, 33 bp, homo sapiens
cacactgccgctcactsagagaggggctagaag

SEQ ID NO: 10925 - DNA, 33 bp, homo sapiens
cttctgtgggaacactsagtacagacctttctt

SEQ ID NO: 10926 - DNA, 33 bp, homo sapiens
aaaaaatctactcaagwcttctgctcatttttc

SEQ ID NO: 10927 - DNA, 33 bp, homo sapiens
gtcagggccctgtcaayggcagcacccccattc

SEQ ID NO: 10928 - DNA, 33 bp, homo sapiens
acccatttaagagttayggactttcggctggga

SEQ ID NO: 10929 - DNA, 33 bp, homo sapiens
catcatccctacacgcycgcgcctgaagattta

SEQ ID NO: 10930 - DNA, 33 bp, homo sapiens
agattggacttgatcamaacatacaacttttgt

SEQ ID NO: 10931 - DNA, 33 bp, homo sapiens
agcaatgatgaccgaaygcttacaagccgggct

SEQ ID NO: 10932 - DNA, 33 bp, homo sapiens
ctgatctccagcgtaaycttagccgtgtgtgag

SEQ ID NO: 10933 - DNA, 33 bp, homo sapiens
ctgggacatccacctcyattcagctccagtgca

SEQ ID NO: 10934 - DNA, 33 bp, homo sapiens
tgtggaggagtgtgaargaaaatgaggatggct

SEQ ID NO: 10935 - DNA, 33 bp, homo sapiens
aggctcatggctggaayctgtgttctcactctt

SEQ ID NO: 10936 - DNA, 33 bp, homo sapiens
acaccataaatataaawgcagctattaagatgt

SEQ ID NO: 10937 - DNA, 33 bp, homo sapiens
aaatatagaaccaaccraaatgactatcaatca

SEQ ID NO: 10938 - DNA, 33 bp, homo sapiens
tataaaatgggtgacaygacaaaatcattacta

SEQ ID NO: 10939 - DNA, 33 bp, homo sapiens
taggacctgctcccagwagagttgatcccagcc

SEQ ID NO: 10940 - DNA, 33 bp, homo sapiens
aaatccacactcatccraaagaatggaaaacca

SEQ ID NO: 10941 - DNA, 33 bp, homo sapiens
atgttatgaacaacacygtatatgcaacttgcc

SEQ ID NO: 10942 - DNA, 33 bp, homo sapiens
cttcatggtgattacayagaaagtcatcagagg

SEQ ID NO: 10943 - DNA, 33 bp, homo sapiens
gattcaaaaaaatgagrcgagcataaattgttc

SEQ ID NO: 10944 - DNA, 33 bp, homo sapiens
gaataactcacactgcsaagttgttatgcctgc

SEQ ID NO: 10945 - DNA, 33 bp, homo sapiens
gtgtgtccttcccaaarcaaggtggtgtttact

SEQ ID NO: 10946 - DNA, 33 bp, homo sapiens
attcctcaaaatcctgraattttacagataaaa

SEQ ID NO: 10947 - DNA, 33 bp, homo sapiens
cttaccacatgctaccrgacacggtcatagtca

SEQ ID NO: 10948 - DNA, 33 bp, homo sapiens
gaataagacaagtatcrctactgttatttaata

SEQ ID NO: 10949 - DNA, 33 bp, homo sapiens
tgaaggaggagtttgaycttagacttctgtcta

SEQ ID NO: 10950 - DNA, 33 bp, homo sapiens
atctacgctctcagcaratttcaagaaaacgat

SEQ ID NO: 10951 - DNA, 33 bp, homo sapiens
tctgcttagaaaagaayggtgaagttgcccaga

SEQ ID NO: 10952 - DNA, 33 bp, homo sapiens
ttgcttacatactgccyagtaatctttcaacca

SEQ ID NO: 10953 - DNA, 33 bp, homo sapiens
gcaatgttaaaaggacygagatgcaggccttct

SEQ ID NO: 10954 - DNA, 33 bp, homo sapiens
aaatagaacagaaccargcgaaacagcccacca

SEQ ID NO: 10955 - DNA, 33 bp, homo sapiens
acacaacatgtaaacaracgagcagggttgtac

SEQ ID NO: 10956 - DNA, 33 bp, homo sapiens
ttgagaagtgctatggmcaacctaatatagggc

SEQ ID NO: 10957 - DNA, 33 bp, homo sapiens
tacagaatcctcatgcygaactcctttcacacc

SEQ ID NO: 10958 - DNA, 33 bp, homo sapiens
gagaggcgagaagaacygaaccatccaatcaga

SEQ ID NO: 10959 - DNA, 33 bp, homo sapiens
atatctagtcagaagayggaggaagagagaaag

SEQ ID NO: 10960 - DNA, 33 bp, homo sapiens
gaagcaaactctctaarcctaacctgtaaaata

SEQ ID NO: 10961 - DNA, 33 bp, homo sapiens
aagaggcaagatacaakagaacattctgcatat

SEQ ID NO: 10962 - DNA, 33 bp, homo sapiens
acagcttaacctttcasaatctcatcttcagag

SEQ ID NO: 10963 - DNA, 33 bp, homo sapiens
ctagtcatgtggcaccraagtatgttactggtg

SEQ ID NO: 10964 - DNA, 33 bp, homo sapiens
tggaaaaagttcagtaycactaatcatcagata

SEQ ID NO: 10965 - DNA, 33 bp, homo sapiens
tacgatacatttcccartcaaaatacagcaaat

SEQ ID NO: 10966 - DNA, 33 bp, homo sapiens
aatgccccagctcttcscaatttcctaacatac

SEQ ID NO: 10967 - DNA, 33 bp, homo sapiens
cactgctgcacatctargatatattctctaaca

SEQ ID NO: 10968 - DNA, 33 bp, homo sapiens
aacctgaagtggtctargaggcatcatttttcc

SEQ ID NO: 10969 - DNA, 33 bp, homo sapiens
aggacgatgttaaataraaacaggattctgagg

SEQ ID NO: 10970 - DNA, 33 bp, homo sapiens
ttttgctacagcttacractagcctcacaaatc

SEQ ID NO: 10971 - DNA, 33 bp, homo sapiens
ttcatactatagaacakactgtcaatcatcaag

SEQ ID NO: 10972 - DNA, 33 bp, homo sapiens
ccaacagcccgactgasaaatgaacaaaggaaa

SEQ ID NO: 10973 - DNA, 33 bp, homo sapiens
gaatagatggaattaayactagaatcacatggt

SEQ ID NO: 10974 - DNA, 33 bp, homo sapiens
tggatgctgaaatgtcragatttacaagacatt

SEQ ID NO: 10975 - DNA, 33 bp, homo sapiens
cagggttggccagaaamactcaaagcacgtaga

SEQ ID NO: 10976 - DNA, 33 bp, homo sapiens
ctgagaaactccaggaygcacgtttgcctcctc

SEQ ID NO: 10977 - DNA, 33 bp, homo sapiens
cctcatgatactctgaraagtgaatatcctctt

SEQ ID NO: 10978 - DNA, 33 bp, homo sapiens
tcacctctcttcccacygtactgcagagcacag

SEQ ID NO: 10979 - DNA, 33 bp, homo sapiens
tgcctgtcaagatgaaygagaacttaggctgga

SEQ ID NO: 10980 - DNA, 33 bp, homo sapiens
aacctcttcctttaacrcggagagcagctgtgc

SEQ ID NO: 10981 - DNA, 33 bp, homo sapiens
ccccctaggaataccargtggaatgctagaccc

SEQ ID NO: 10982 - DNA, 33 bp, homo sapiens
gatgcaccaggagtaayggattttggtggagaa

SEQ ID NO: 10983 - DNA, 33 bp, homo sapiens
tagataaaaggatcacragaatataaaatatac

SEQ ID NO: 10984 - DNA, 33 bp, homo sapiens
aatttgcaaagctaatraaaatgttctagattt

SEQ ID NO: 10985 - DNA, 33 bp, homo sapiens
tacatctacagatctayattacatctacaagta

SEQ ID NO: 10986 - DNA, 33 bp, homo sapiens
gtcagggttcacaccaraagaaaacgctcactc

SEQ ID NO: 10987 - DNA, 33 bp, homo sapiens
gaaaggtgttcacaacyaaagtctattggctca

SEQ ID NO: 10988 - DNA, 33 bp, homo sapiens
gcataaattgtcctccraaatttctcataggtt

SEQ ID NO: 10989 - DNA, 33 bp, homo sapiens
ctccataagaaactgargatgccaataaatggg

SEQ ID NO: 10990 - DNA, 33 bp, homo sapiens
ctaatcagataatgtaygatgtttttagtgttc

SEQ ID NO: 10991 - DNA, 33 bp, homo sapiens
tggaacagtatttatcyaccgtctgtgcaaacc

SEQ ID NO: 10992 - DNA, 33 bp, homo sapiens
tgtggctaagaggttcmaataaatgttctcagg

SEQ ID NO: 10993 - DNA, 33 bp, homo sapiens
aattgcaataaattcaragtgcaattaagaagt

SEQ ID NO: 10994 - DNA, 33 bp, homo sapiens
gacctgtttccacaagyacatgatgtcgtttgt

SEQ ID NO: 10995 - DNA, 33 bp, homo sapiens
aaccctaatacagacargatatgagagatgaag

SEQ ID NO: 10996 - DNA, 33 bp, homo sapiens
atcccagggaggaagaktattaaaaggttactc

SEQ ID NO: 10997 - DNA, 33 bp, homo sapiens
actggccttcccttcckcaaagctgggtgacaa

SEQ ID NO: 10998 - DNA, 33 bp, homo sapiens
aacaaataaacggaaakataagctctttacagc

SEQ ID NO: 10999 - DNA, 33 bp, homo sapiens
tttcattggatacctgyaccttctgcatgtgag

SEQ ID NO: 11000 - DNA, 33 bp, homo sapiens
tctcagtgtctcatagyctagtccaaaaccatg

SEQ ID NO: 11001 - DNA, 33 bp, homo sapiens
taaaaaggcaggtaagracgcatagaaagggag

SEQ ID NO: 11002 - DNA, 33 bp, homo sapiens
actacactcttaaacayagtaccctctactggt

SEQ ID NO: 11003 - DNA, 33 bp, homo sapiens
ggaggcaagaaacctayactccataaaagtagc

SEQ ID NO: 11004 - DNA, 33 bp, homo sapiens
aatgggtggtaaactgratggtaagataccttc

SEQ ID NO: 11005 - DNA, 33 bp, homo sapiens
gatattaagaattcacrccactgaaatgctatg

SEQ ID NO: 11006 - DNA, 33 bp, homo sapiens
cattacatactgatgawagacaataccacagtt

SEQ ID NO: 11007 - DNA, 33 bp, homo sapiens
gctgaggttattttacwcttaactagactttct

SEQ ID NO: 11008 - DNA, 33 bp, homo sapiens
tgctactgtgttttgcscagagttaggacaatt

SEQ ID NO: 11009 - DNA, 33 bp, homo sapiens
ttggttccttcacttcragttactgttgtaggt

SEQ ID NO: 11010 - DNA, 33 bp, homo sapiens
gttagggagatggagasgaagttacagagcaca

SEQ ID NO: 11011 - DNA, 33 bp, homo sapiens
gtttgacctgagtcaakgattcctaacttgact

SEQ ID NO: 11012 - DNA, 33 bp, homo sapiens
agtgcctggctttctgragatcagtggatgtct

SEQ ID NO: 11013 - DNA, 33 bp, homo sapiens
taatcataggtatcacygtagagactcaatatg

SEQ ID NO: 11014 - DNA, 33 bp, homo sapiens
atctgcatacctagatwataatgcaacactgca

SEQ ID NO: 11015 - DNA, 33 bp, homo sapiens
ctaaatgtcctccatcmactgtcatttagcaga

SEQ ID NO: 11016 - DNA, 33 bp, homo sapiens
ggaaacttaacttctarccagatatggtgaaat

SEQ ID NO: 11017 - DNA, 33 bp, homo sapiens
catttacttttacaacrgaattactgagcccaa

SEQ ID NO: 11018 - DNA, 33 bp, homo sapiens
gttgtatgctcctatartagcccttctccaagg

SEQ ID NO: 11019 - DNA, 33 bp, homo sapiens
gtgggtactgtcctaaktgtccattatggcatt

SEQ ID NO: 11020 - DNA, 33 bp, homo sapiens
caatatctggtcctggraatgtcagactcaaaa

SEQ ID NO: 11021 - DNA, 33 bp, homo sapiens
aagaaacatcaaaatayaggtggtccaggggaa

SEQ ID NO: 11022 - DNA, 33 bp, homo sapiens
atgccgtgtagcttcaragagaacaataggaaa

SEQ ID NO: 11023 - DNA, 33 bp, homo sapiens
aactgtgtagtgtatcraatattctggtttctt

SEQ ID NO: 11024 - DNA, 33 bp, homo sapiens
ataaaaaaagatcgtarctccaaaagttcagct

SEQ ID NO: 11025 - DNA, 33 bp, homo sapiens
agcaactagttaacaayttcatcatgggaacaa

SEQ ID NO: 11026 - DNA, 33 bp, homo sapiens
cctccctggcaggatasgtcattaggagagctc

SEQ ID NO: 11027 - DNA, 33 bp, homo sapiens
tttttccttgtccaaartacttctcagtgggga

SEQ ID NO: 11028 - DNA, 33 bp, homo sapiens
actgatgagttattaayggttcatgatctgtag

SEQ ID NO: 11029 - DNA, 33 bp, homo sapiens
tttggtaaatccatacmggcctaaaatcttctt

SEQ ID NO: 11030 - DNA, 33 bp, homo sapiens
ctgtcagctttgaatascttctagttgagttag

SEQ ID NO: 11031 - DNA, 33 bp, homo sapiens
gccacagaactgagacygaatggaaatcaccta

SEQ ID NO: 11032 - DNA, 33 bp, homo sapiens
cgaatcctattcttaargatgaggaacctgagt

SEQ ID NO: 11033 - DNA, 33 bp, homo sapiens
cacatgacaagagggcragtgacacgctgtaga

SEQ ID NO: 11034 - DNA, 33 bp, homo sapiens
agatctatcatctttcyacctcaaataaaattc

SEQ ID NO: 11035 - DNA, 33 bp, homo sapiens
ttaagctgctacatgamatgcaaaatcattaag

SEQ ID NO: 11036 - DNA, 33 bp, homo sapiens
caggtctcagtttggawcacaggtagtacgtaa

SEQ ID NO: 11037 - DNA, 33 bp, homo sapiens
tgatttattaacactgmactgacagtcaacagt

SEQ ID NO: 11038 - DNA, 33 bp, homo sapiens
tccactgactgctaaaraccaatggaaataact

SEQ ID NO: 11039 - DNA, 33 bp, homo sapiens
cgaggtggttgggaggyccatatgacataatgt

SEQ ID NO: 11040 - DNA, 33 bp, homo sapiens
agaatggtcaacctacraataatagacctacag

SEQ ID NO: 11041 - DNA, 33 bp, homo sapiens
ctcctccaccccattgyatataagcctggaggt

SEQ ID NO: 11042 - DNA, 33 bp, homo sapiens
taagatcagtatagccrcatgtagtagtagcag

SEQ ID NO: 11043 - DNA, 33 bp, homo sapiens
tgtaaaataatccaacracagaaagtcaagcct

SEQ ID NO: 11044 - DNA, 33 bp, homo sapiens
ataaataaatacaatcrcaaaaggttcgtgcat

SEQ ID NO: 11045 - DNA, 33 bp, homo sapiens
ctgcaaagtgagtgcartaggagagttgggaaa

SEQ ID NO: 11046 - DNA, 33 bp, homo sapiens
ttgtatccccaacaacyaacaaaattcctgcag

SEQ ID NO: 11047 - DNA, 33 bp, homo sapiens
ctaatcattaaggggargtatgaaattgaggaa

SEQ ID NO: 11048 - DNA, 33 bp, homo sapiens
tgtttttgaagtatctsagaattgaagagggct

SEQ ID NO: 11049 - DNA, 33 bp, homo sapiens
agagcatatttggcatractctaatccttgtga

SEQ ID NO: 11050 - DNA, 33 bp, homo sapiens
gttcacttagggcttaycaccaaatagctccac

SEQ ID NO: 11051 - DNA, 33 bp, homo sapiens
agttgactcttgaggaytcccctgcctaaaaaa

SEQ ID NO: 11052 - DNA, 33 bp, homo sapiens
atttgttactaaaagamaggattcatctggaga

SEQ ID NO: 11053 - DNA, 33 bp, homo sapiens
caaataggtccttcaamtatctaagaaaacaac

SEQ ID NO: 11054 - DNA, 33 bp, homo sapiens
taatgcacaatgaaatraaggcataagtcttcc

SEQ ID NO: 11055 - DNA, 33 bp, homo sapiens
attatacaaaaaagacwactgtgcttgtatgtt

SEQ ID NO: 11056 - DNA, 33 bp, homo sapiens
ctgtgctctttctcatyaagcctatttcttcca

SEQ ID NO: 11057 - DNA, 33 bp, homo sapiens
aaaactccaaggttgcrgagaagttagtgagac

SEQ ID NO: 11058 - DNA, 33 bp, homo sapiens
atttgctcctctatcartgagagtaataccatc

SEQ ID NO: 11059 - DNA, 33 bp, homo sapiens
attaacaatgagaagamtcgctcctctcaaatg

SEQ ID NO: 11060 - DNA, 33 bp, homo sapiens
gttattctcatacatayggagttcacaaaattt

SEQ ID NO: 11061 - DNA, 33 bp, homo sapiens
aaaacctaggaaggccraactgaagataacagg

SEQ ID NO: 11062 - DNA, 33 bp, homo sapiens
agtgtcatcctaggagyaattagtgagttctca

SEQ ID NO: 11063 - DNA, 33 bp, homo sapiens
cacagcagccctactgragagtgtcctgactgt

SEQ ID NO: 11064 - DNA, 33 bp, homo sapiens
acagatcttccttttaygtcttgtccatgctct

SEQ ID NO: 11065 - DNA, 33 bp, homo sapiens
cttatatagaaaaatgycaaaattcagttaagc

SEQ ID NO: 11066 - DNA, 33 bp, homo sapiens
aattaagaggtttatgraagtctagtgataggg

SEQ ID NO: 11067 - DNA, 33 bp, homo sapiens
cctccccagccttttgkaagtgagtgaaagagg

SEQ ID NO: 11068 - DNA, 33 bp, homo sapiens
tcctgaaagaagacaarcaaaatttgcaaattt

SEQ ID NO: 11069 - DNA, 33 bp, homo sapiens
aaaaactgagtgctgayagaagggtgatacaga

SEQ ID NO: 11070 - DNA, 33 bp, homo sapiens
ctgccgtagatcaaaasttgcaaggctctttga

SEQ ID NO: 11071 - DNA, 33 bp, homo sapiens
tctcatcctggaatgawtaaaagtaccagaagc

SEQ ID NO: 11072 - DNA, 33 bp, homo sapiens
aagcagaaaaaagggartcaaagctggaccatg

SEQ ID NO: 11073 - DNA, 33 bp, homo sapiens
acaaattactgatatcygagaaccttgaggcca

SEQ ID NO: 11074 - DNA, 33 bp, homo sapiens
taaacatatctaaacayagcatagaaaaggtac

SEQ ID NO: 11075 - DNA, 33 bp, homo sapiens
tttaggatatatgttgwaagcaaaatttcagca

SEQ ID NO: 11076 - DNA, 33 bp, homo sapiens
actattattatctcccragtttactatatcata

SEQ ID NO: 11077 - DNA, 33 bp, homo sapiens
gtttgtttactccagcrctaattaagtctttca

SEQ ID NO: 11078 - DNA, 33 bp, homo sapiens
attttagcctctggatmaaatgaggtacccatt

SEQ ID NO: 11079 - DNA, 33 bp, homo sapiens
gacaggatgaaaaatcrcagtaggtctgtctgg

SEQ ID NO: 11080 - DNA, 33 bp, homo sapiens
cttggtgatatctgtaygaccacagggtttaga

SEQ ID NO: 11081 - DNA, 33 bp, homo sapiens
aatgtacatgcgtttayagtcacatttagattt

SEQ ID NO: 11082 - DNA, 33 bp, homo sapiens
ccagaggaatgaacatragctgactgctggtga

SEQ ID NO: 11083 - DNA, 33 bp, homo sapiens
gtgtcagattgaatccyagaaacctgatcccat

SEQ ID NO: 11084 - DNA, 33 bp, homo sapiens
agtaataaatagtgtcraaaccatgggcctctt

SEQ ID NO: 11085 - DNA, 33 bp, homo sapiens
aactgctactgatatcygaggggtagaagccag

SEQ ID NO: 11086 - DNA, 33 bp, homo sapiens
atttctcttcagcaaamaggttagagtccttgc

SEQ ID NO: 11087 - DNA, 33 bp, homo sapiens
atgaagaaggccatgcyaaatactgtgcaggac

SEQ ID NO: 11088 - DNA, 33 bp, homo sapiens
ccaagagatgggttaargaagacgcagaggaca

SEQ ID NO: 11089 - DNA, 33 bp, homo sapiens
tcatcctgacaaccacmgcgatctactgaagga

SEQ ID NO: 11090 - DNA, 33 bp, homo sapiens
gaatgtgatatggttaragggtcaagttttatg

SEQ ID NO: 11091 - DNA, 33 bp, homo sapiens
ttaattgctggttgaaytgaatacttgcttcat

SEQ ID NO: 11092 - DNA, 33 bp, homo sapiens
ttaatcctcacccttcrcagtccagaggctgcc

SEQ ID NO: 11093 - DNA, 33 bp, homo sapiens
gtctgtagtttaagccwctcaatctataatatt

SEQ ID NO: 11094 - DNA, 33 bp, homo sapiens
aaaaagaaacatcaccragacaaaacaaaaagc

SEQ ID NO: 11095 - DNA, 33 bp, homo sapiens
ctgggctcatatcaaartgacagagttttcatc

SEQ ID NO: 11096 - DNA, 33 bp, homo sapiens
cacctgctatgcataayaacctatctctagacc

SEQ ID NO: 11097 - DNA, 33 bp, homo sapiens
ggctctttggcagtcaygtctagaggaatggaa

SEQ ID NO: 11098 - DNA, 33 bp, homo sapiens
tcagtgaggcatttccrcttcttctttaacaaa

SEQ ID NO: 11099 - DNA, 33 bp, homo sapiens
atttgtttcctgtttcraacttctggagatata

SEQ ID NO: 11100 - DNA, 33 bp, homo sapiens
ttttagtgatgtgtcarcgcacaatgaggaaaa

SEQ ID NO: 11101 - DNA, 33 bp, homo sapiens
ccatcagtctcctttayatccgtcaggtttcag

SEQ ID NO: 11102 - DNA, 33 bp, homo sapiens
tatccctctgataatcratagtgtggaggcagc

SEQ ID NO: 11103 - DNA, 33 bp, homo sapiens
taaatttaagagttatyagagaggcaaaattga

SEQ ID NO: 11104 - DNA, 33 bp, homo sapiens
tgccaggggcactatgraggaaagagatgctgc

SEQ ID NO: 11105 - DNA, 33 bp, homo sapiens
aggagtcctgaaacaayagaattttactctctc

SEQ ID NO: 11106 - DNA, 33 bp, homo sapiens
actacactgtaagtackcagtaaatattagctg

SEQ ID NO: 11107 - DNA, 33 bp, homo sapiens
gctctctaggagtttayagtccaggagggaagg

SEQ ID NO: 11108 - DNA, 33 bp, homo sapiens
gatcacagatgcaagarcctgagataaagaggg

SEQ ID NO: 11109 - DNA, 33 bp, homo sapiens
agggttagtttgccccrcacatagctctaatcc

SEQ ID NO: 11110 - DNA, 33 bp, homo sapiens
cagtggttaatgtggayggttatgactactcat

SEQ ID NO: 11111 - DNA, 33 bp, homo sapiens
gggatagccaagcctcrcattcatttaaaaggc

SEQ ID NO: 11112 - DNA, 33 bp, homo sapiens
ctgtttgtgggaaataygctcaacctcctcaaa

SEQ ID NO: 11113 - DNA, 33 bp, homo sapiens
agagaccagtaggaaartaacttaggagactca

SEQ ID NO: 11114 - DNA, 33 bp, homo sapiens
ctcagtgaaaatggaasgtcagatttctgggaa

SEQ ID NO: 11115 - DNA, 33 bp, homo sapiens
cttctatgcctaagacyaataattgctcctaga

SEQ ID NO: 11116 - DNA, 33 bp, homo sapiens
ccctagggcttcctaakcttatctaacttatgc

SEQ ID NO: 11117 - DNA, 33 bp, homo sapiens
ttcaatatcttgtccaragttattgctagcgtt

SEQ ID NO: 11118 - DNA, 33 bp, homo sapiens
aacagaatttaaaaggrccattctaattatagt

SEQ ID NO: 11119 - DNA, 33 bp, homo sapiens
aatctcaactgggaaamtgctttaaagaaatca

SEQ ID NO: 11120 - DNA, 33 bp, homo sapiens
gaaattcaatattgaartggtcaaaaatggaat

SEQ ID NO: 11121 - DNA, 33 bp, homo sapiens
tagctccccaagataaygatctagcactgtatt

SEQ ID NO: 11122 - DNA, 33 bp, homo sapiens
cttaactatttatatamctttcccactccatga

SEQ ID NO: 11123 - DNA, 33 bp, homo sapiens
tacatagcaccatctayaaaataactgccaaaa

SEQ ID NO: 11124 - DNA, 33 bp, homo sapiens
caagctcaagggttgayagtgaaccacaggtag

SEQ ID NO: 11125 - DNA, 33 bp, homo sapiens
tgtcattcaacaaacaygtactaagagctcact

SEQ ID NO: 11126 - DNA, 33 bp, homo sapiens
catcgcttttacctatraaccacatcttccttt

SEQ ID NO: 11127 - DNA, 33 bp, homo sapiens
cctgtttttgtattccrcttgtcacttccctgg

SEQ ID NO: 11128 - DNA, 33 bp, homo sapiens
aatcattttaatggtaygaacactgagaaacag

SEQ ID NO: 11129 - DNA, 33 bp, homo sapiens
cctgctgaaagcagacrataatgcctctctcat

SEQ ID NO: 11130 - DNA, 33 bp, homo sapiens
ttctggagctgtctggrataaagtgccatctct

SEQ ID NO: 11131 - DNA, 33 bp, homo sapiens
ttagcttcattgctagratgcttgggactttta

SEQ ID NO: 11132 - DNA, 33 bp, homo sapiens
gtgtgtatgaaaggggyatagcgccagagatga

SEQ ID NO: 11133 - DNA, 33 bp, homo sapiens
caactccggtacgtcayacaagtgaatcataca

SEQ ID NO: 11134 - DNA, 33 bp, homo sapiens
ttttaccataattcaayaggtgctcgctaggtc

SEQ ID NO: 11135 - DNA, 33 bp, homo sapiens
aacttaagttgagccamagtgtgttataaaact

SEQ ID NO: 11136 - DNA, 33 bp, homo sapiens
agaacttaataagagcmacatactatagtggga

SEQ ID NO: 11137 - DNA, 33 bp, homo sapiens
aagccatatgaaggtaragtctgtgtctatctt

SEQ ID NO: 11138 - DNA, 33 bp, homo sapiens
tgcctcacgaattaaaygagcagttacatacaa

SEQ ID NO: 11139 - DNA, 33 bp, homo sapiens
attgtggtagcctttayatgactatacacttgt

SEQ ID NO: 11140 - DNA, 33 bp, homo sapiens
tagttagcaaatggtcratctattctccttgta

SEQ ID NO: 11141 - DNA, 33 bp, homo sapiens
tttctcattaagacccmgaatcacaagaatgtc

SEQ ID NO: 11142 - DNA, 33 bp, homo sapiens
attttaatgagaaaacygtatctatttgactgg

SEQ ID NO: 11143 - DNA, 33 bp, homo sapiens
aaaaaggaaccatgaayagatctgatgaagaag

SEQ ID NO: 11144 - DNA, 33 bp, homo sapiens
tcactcaggaggaatayagatgagcggtttatt

SEQ ID NO: 11145 - DNA, 33 bp, homo sapiens
gagaagtgagattgccmaacacttatattttga

SEQ ID NO: 11146 - DNA, 33 bp, homo sapiens
ggtaaaatgttgccaaytatgaagagaagtgag

SEQ ID NO: 11147 - DNA, 33 bp, homo sapiens
ctggtcaaaacaacacyagtgcatcccttgcac

SEQ ID NO: 11148 - DNA, 33 bp, homo sapiens
atttgagtttattccargtatgctaggtatgtt

SEQ ID NO: 11149 - DNA, 33 bp, homo sapiens
agggtgaagtcataacmaaggcaaaatatagtg

SEQ ID NO: 11150 - DNA, 33 bp, homo sapiens
cattctgtatagcctakggaaccacctattttc

SEQ ID NO: 11151 - DNA, 33 bp, homo sapiens
cagaccattgactgaasagcattcacgtagtct

SEQ ID NO: 11152 - DNA, 33 bp, homo sapiens
ttatttgaatttgttaygaagacaatgtgccaa

SEQ ID NO: 11153 - DNA, 33 bp, homo sapiens
ttctgaaaaattcttayagttaggacagaaaca

SEQ ID NO: 11154 - DNA, 33 bp, homo sapiens
aaacaaagtaaacccaytgattatgtgtgctgc

SEQ ID NO: 11155 - DNA, 33 bp, homo sapiens
aagagtcatcaataacrctgaatacttatgact

SEQ ID NO: 11156 - DNA, 33 bp, homo sapiens
tcatttcagtggcagayaattgttctatttaat

SEQ ID NO: 11157 - DNA, 33 bp, homo sapiens
tgaaatcagccaaacckcctgtaagaaaatgcc

SEQ ID NO: 11158 - DNA, 33 bp, homo sapiens
ataatcagtgacaaaasataagttgacttcttt

SEQ ID NO: 11159 - DNA, 33 bp, homo sapiens
agaaatgtgcatcctcratatgattttcctgtg

SEQ ID NO: 11160 - DNA, 33 bp, homo sapiens
aggcaaaacagatcagmaattaatggtcccatc

SEQ ID NO: 11161 - DNA, 33 bp, homo sapiens
ctgatagatatttaccraacatttcaggtaaga

SEQ ID NO: 11162 - DNA, 33 bp, homo sapiens
ctggatggcagaacaaktagaggagaataaatt

SEQ ID NO: 11163 - DNA, 33 bp, homo sapiens
tgttttgtgaggtcttmaaagcgaaatatttgg

SEQ ID NO: 11164 - DNA, 33 bp, homo sapiens
tctctgcaaaaaaggaracattgaagcagaaaa

SEQ ID NO: 11165 - DNA, 33 bp, homo sapiens
gataattttgactacawtaactatcaataacca

SEQ ID NO: 11166 - DNA, 33 bp, homo sapiens
ctagagccaatgattcmaagattttaaatatgt

SEQ ID NO: 11167 - DNA, 33 bp, homo sapiens
aaatagcttatagttawacaccaaatatcttct

SEQ ID NO: 11168 - DNA, 33 bp, homo sapiens
ataatagacaggcgaaraaatttatgtccatat

SEQ ID NO: 11169 - DNA, 33 bp, homo sapiens
caccttgaattgtaatratcctaacgtgtcatg

SEQ ID NO: 11170 - DNA, 33 bp, homo sapiens
ttagtgtaaatatgagsattagttataggcact

SEQ ID NO: 11171 - DNA, 33 bp, homo sapiens
aggctaggaatgagagyccaaatactttacaag

SEQ ID NO: 11172 - DNA, 33 bp, homo sapiens
atggtgcaaatcatcaytgaaatccatgatcag

SEQ ID NO: 11173 - DNA, 33 bp, homo sapiens
ctgtccagggctttaayaggtgaaggccaggta

SEQ ID NO: 11174 - DNA, 33 bp, homo sapiens
tcatggggctttgcatyaggagtgagaataatc

SEQ ID NO: 11175 - DNA, 33 bp, homo sapiens
ctctcactcttcatccyatatggaaaaaaattc

SEQ ID NO: 11176 - DNA, 33 bp, homo sapiens
attcttctgatcaaacygctaacattgggctga

SEQ ID NO: 11177 - DNA, 33 bp, homo sapiens
catgtactatttgaatmatcagtaaaaacagca

SEQ ID NO: 11178 - DNA, 33 bp, homo sapiens
tttggtatcatgatcayattagtcatactgaat

SEQ ID NO: 11179 - DNA, 33 bp, homo sapiens
actgagaccactactaygtgacttacacgtggg

SEQ ID NO: 11180 - DNA, 33 bp, homo sapiens
ttttcttcctacaagaragagaacaacttcata

SEQ ID NO: 11181 - DNA, 33 bp, homo sapiens
aattgctttatttctcwatcttgtaactattag

SEQ ID NO: 11182 - DNA, 33 bp, homo sapiens
ttgtctttccatgatakcaataacttttaacat

SEQ ID NO: 11183 - DNA, 33 bp, homo sapiens
attgggtctctcttccyggaaagttcaagtatt

SEQ ID NO: 11184 - DNA, 33 bp, homo sapiens
atatgttagcctggaayagcgatctcagataga

SEQ ID NO: 11185 - DNA, 33 bp, homo sapiens
tcatttagtcaaaggcycaatgatctggaatca

SEQ ID NO: 11186 - DNA, 33 bp, homo sapiens
tggtgtgacatgattamatttgcgttttttttt

SEQ ID NO: 11187 - DNA, 33 bp, homo sapiens
tattacttttagcaaaygtatagctacctgtta

SEQ ID NO: 11188 - DNA, 33 bp, homo sapiens
tgaaggtgataaatggycaattagtcaaccaga

SEQ ID NO: 11189 - DNA, 33 bp, homo sapiens
atatacatagcaaaatsaagcaaataaaaatca

SEQ ID NO: 11190 - DNA, 33 bp, homo sapiens
actctgctaagaaatayggtgtttgcttactag

SEQ ID NO: 11191 - DNA, 33 bp, homo sapiens
ccttccagatgctaccrattttactccccaggt

SEQ ID NO: 11192 - DNA, 33 bp, homo sapiens
ttcattctactgaaacyggacttttttttctgg

SEQ ID NO: 11193 - DNA, 33 bp, homo sapiens
accccttactcctactraactggcacatatact

SEQ ID NO: 11194 - DNA, 33 bp, homo sapiens
tgcaatacaaactaacwctcacagagactaaaa

SEQ ID NO: 11195 - DNA, 33 bp, homo sapiens
gatgggggcgggaagtkaactgttcaatgaata

SEQ ID NO: 11196 - DNA, 33 bp, homo sapiens
attgttcgacacagtasacattgcagttctcac

SEQ ID NO: 11197 - DNA, 33 bp, homo sapiens
cctacagaaagtgaccracttgttcatagttat

SEQ ID NO: 11198 - DNA, 33 bp, homo sapiens
ttaattattacccgatyaactgagatctatgct

SEQ ID NO: 11199 - DNA, 33 bp, homo sapiens
agtgttacaaagttagycagatctcaataaaaa

SEQ ID NO: 11200 - DNA, 33 bp, homo sapiens
agatgacatttcaacascatcctgaaggaactg

SEQ ID NO: 11201 - DNA, 33 bp, homo sapiens
ttacccttattttaccrcaccattccataattc

SEQ ID NO: 11202 - DNA, 33 bp, homo sapiens
cccactatgcatttagyaggacattgaacagaa

SEQ ID NO: 11203 - DNA, 33 bp, homo sapiens
tgggacaatagaggtasaacccagacaactggg

SEQ ID NO: 11204 - DNA, 33 bp, homo sapiens
tactgtgtgatcactargagtaacagtactgaa

SEQ ID NO: 11205 - DNA, 33 bp, homo sapiens
gtgcccacttaagaaasagctgggtcagccaag

SEQ ID NO: 11206 - DNA, 33 bp, homo sapiens
attctccactgaactaracactaaagcagcata

SEQ ID NO: 11207 - DNA, 33 bp, homo sapiens
gatttctcacgggaaawgttacctgtctcctcc

SEQ ID NO: 11208 - DNA, 33 bp, homo sapiens
actacattttctataaktacccctagctgttcc

SEQ ID NO: 11209 - DNA, 33 bp, homo sapiens
ggaatatatgaggactracagtaaaataaagga

SEQ ID NO: 11210 - DNA, 33 bp, homo sapiens
ttgatgcgctgttaaamttgttttgctagtttt

SEQ ID NO: 11211 - DNA, 33 bp, homo sapiens
caagttagtagtttggyaaagctagaatgtcaa

SEQ ID NO: 11212 - DNA, 33 bp, homo sapiens
gtacacaggactgaaamagtgaatagtctatat

SEQ ID NO: 11213 - DNA, 33 bp, homo sapiens
ggtacctcatctattayactcaggagcagctac

SEQ ID NO: 11214 - DNA, 33 bp, homo sapiens
catatatcctatctgcycagattaccgtagagc

SEQ ID NO: 11215 - DNA, 33 bp, homo sapiens
ttttaattaaattgaastaccattagacagttc

SEQ ID NO: 11216 - DNA, 33 bp, homo sapiens
tgggtgacagaaggacygctataatagaccctc

SEQ ID NO: 11217 - DNA, 33 bp, homo sapiens
aggagagctgtcctcayctaggtccgtaggcat

SEQ ID NO: 11218 - DNA, 33 bp, homo sapiens
tcttctgcttgggtackcagactgcatgattag

SEQ ID NO: 11219 - DNA, 33 bp, homo sapiens
tttgtttctcactcacrggatgcaagctgcata

SEQ ID NO: 11220 - DNA, 33 bp, homo sapiens
tctgcctgtgtatcgcygaaactttgtttcttg

SEQ ID NO: 11221 - DNA, 33 bp, homo sapiens
gttatagctattggaakggaatgcactgacttt

SEQ ID NO: 11222 - DNA, 33 bp, homo sapiens
agaaatcagctttagcwacctggtttctcttgt

SEQ ID NO: 11223 - DNA, 33 bp, homo sapiens
ggatgaaattgatagayggctgtataaacctat

SEQ ID NO: 11224 - DNA, 33 bp, homo sapiens
caagcaatatgggaagkatcacctattcaacaa

SEQ ID NO: 11225 - DNA, 33 bp, homo sapiens
tgtggtagaacaataasgtatgaagaattgaat

SEQ ID NO: 11226 - DNA, 33 bp, homo sapiens
tctaccacagaatgtamctttttaaatctctca

SEQ ID NO: 11227 - DNA, 33 bp, homo sapiens
ctacaaatatctttacrgcgaactgattacacc

SEQ ID NO: 11228 - DNA, 33 bp, homo sapiens
cttaagtgatgaggacytagatttgaccccagt

SEQ ID NO: 11229 - DNA, 33 bp, homo sapiens
gttcggtttcaagccaratatagagaaaatatt

SEQ ID NO: 11230 - DNA, 33 bp, homo sapiens
cacaaagccttgcccarattacagactcatgaa

SEQ ID NO: 11231 - DNA, 33 bp, homo sapiens
cttaaaacgacaaaacraaagatagctatgtga

SEQ ID NO: 11232 - DNA, 33 bp, homo sapiens
tatttgttagctcagawaataatgtaaggattt

SEQ ID NO: 11233 - DNA, 33 bp, homo sapiens
tttcttggctgtaagcraatagaaactgaaaat

SEQ ID NO: 11234 - DNA, 33 bp, homo sapiens
ggaatcagaactcaaaytgatgcattcttttac

SEQ ID NO: 11235 - DNA, 33 bp, homo sapiens
cacttcataatgacaamattttcaagtcactag

SEQ ID NO: 11236 - DNA, 33 bp, homo sapiens
gataaactacttaagcygatgactgtaagaaca

SEQ ID NO: 11237 - DNA, 33 bp, homo sapiens
ccaatttagccttcaamtatccatccatgcctc

SEQ ID NO: 11238 - DNA, 33 bp, homo sapiens
tatatttttaatgccayatagcctgaccctgat

SEQ ID NO: 11239 - DNA, 33 bp, homo sapiens
ccattttttcattaaastgtttgtcatttgggt

SEQ ID NO: 11240 - DNA, 33 bp, homo sapiens
cgtcacttcctagtccrgataaccagatccagt

SEQ ID NO: 11241 - DNA, 33 bp, homo sapiens
tttgctctattcttagrccttgtaccaaagttc

SEQ ID NO: 11242 - DNA, 33 bp, homo sapiens
gtaggtggggttaacaytgatgaagataatata

SEQ ID NO: 11243 - DNA, 33 bp, homo sapiens
cattcctgccaattcayactttcaaattcacac

SEQ ID NO: 11244 - DNA, 33 bp, homo sapiens
aagatagtctcccttarcatcagcaggagctgg

SEQ ID NO: 11245 - DNA, 33 bp, homo sapiens
ttgggtggtctcctgaraagtctttcatttttg

SEQ ID NO: 11246 - DNA, 33 bp, homo sapiens
acgtgatatgtcgaatratgttctttggagaca

SEQ ID NO: 11247 - DNA, 33 bp, homo sapiens
gcgtttgaaggcccccwaaatgagcaattgagc

SEQ ID NO: 11248 - DNA, 33 bp, homo sapiens
ctgatctttgtcctagyatcgtagagaccatgc

SEQ ID NO: 11249 - DNA, 33 bp, homo sapiens
ttggagagacaggttamataaactaaacatact

SEQ ID NO: 11250 - DNA, 33 bp, homo sapiens
gggaatttatcctggarcaaggacacagaatat

SEQ ID NO: 11251 - DNA, 33 bp, homo sapiens
accatatctgtggctargtgctcttaattctgt

SEQ ID NO: 11252 - DNA, 33 bp, homo sapiens
tttccctggttgatgargtgttaggtacgttag

SEQ ID NO: 11253 - DNA, 33 bp, homo sapiens
cgtgaatttttatagcygcattgtaatccattc

SEQ ID NO: 11254 - DNA, 33 bp, homo sapiens
catcacagtgttgtcawcgagggggcctttagg

SEQ ID NO: 11255 - DNA, 33 bp, homo sapiens
gaaaaggatttgagagraagtgtcagatacaga

SEQ ID NO: 11256 - DNA, 33 bp, homo sapiens
agttatgctataggacwaaatgcgcattgcttt

SEQ ID NO: 11257 - DNA, 33 bp, homo sapiens
taagagtaagagcacaytcaatcatggaaatgg

SEQ ID NO: 11258 - DNA, 33 bp, homo sapiens
agacaacagaatgggasaaagtagttacgaatc

SEQ ID NO: 11259 - DNA, 33 bp, homo sapiens
catgaaataggcacaaytatcttcatccccatc

SEQ ID NO: 11260 - DNA, 33 bp, homo sapiens
atttctttgctcttgarctgagagctgtaattt

SEQ ID NO: 11261 - DNA, 33 bp, homo sapiens
aagaaagtgtacattcyaattccctggactaaa

SEQ ID NO: 11262 - DNA, 33 bp, homo sapiens
aaatgatcaatattcakcaaaacctcagacaat

SEQ ID NO: 11263 - DNA, 33 bp, homo sapiens
gtccctaataggccagragcagcccatgaatat

SEQ ID NO: 11264 - DNA, 33 bp, homo sapiens
ccattcagcagaagcartactttgaattttgat

SEQ ID NO: 11265 - DNA, 33 bp, homo sapiens
gcttgagtctttgatayaggggtgacagagata

SEQ ID NO: 11266 - DNA, 33 bp, homo sapiens
gaatcagctggattcayactgaggaatacatcc

SEQ ID NO: 11267 - DNA, 33 bp, homo sapiens
aactcaaagtagccacyctgaaagaactagggt

SEQ ID NO: 11268 - DNA, 33 bp, homo sapiens
gttatcaggtgacacaygtcaggttgtcctatt

SEQ ID NO: 11269 - DNA, 33 bp, homo sapiens
attcatccatttttcckgagaacaacacttttc

SEQ ID NO: 11270 - DNA, 33 bp, homo sapiens
gtagtggaaaactcaayggaaacagataaacaa

SEQ ID NO: 11271 - DNA, 33 bp, homo sapiens
taagcttccctacatcraaaccagcacaaataa

SEQ ID NO: 11272 - DNA, 33 bp, homo sapiens
atttgtgattggaatgkagcaaaattaatatga

SEQ ID NO: 11273 - DNA, 33 bp, homo sapiens
gctgcttgctaggacaytgtattgctgaggcca

SEQ ID NO: 11274 - DNA, 33 bp, homo sapiens
aatgaacacaatattckccagctaaggtggaaa

SEQ ID NO: 11275 - DNA, 33 bp, homo sapiens
tactaagcctttattgsagtcatgttgataggt

SEQ ID NO: 11276 - DNA, 33 bp, homo sapiens
tgagaaatctgaaaacrctgggggagtttcact

SEQ ID NO: 11277 - DNA, 33 bp, homo sapiens
tgatgttccctaatcaratttcatgatgaaaga

SEQ ID NO: 11278 - DNA, 33 bp, homo sapiens
gtctagtatcagactgyaacctgcaatacaagt

SEQ ID NO: 11279 - DNA, 33 bp, homo sapiens
acaggtgaatgtcaacmactctgggtcaaaaaa

SEQ ID NO: 11280 - DNA, 33 bp, homo sapiens
caaatattaaccagaamtgccactatgatgtct

SEQ ID NO: 11281 - DNA, 33 bp, homo sapiens
gcacaggagaccatatyaatgcgcaggactaga

SEQ ID NO: 11282 - DNA, 33 bp, homo sapiens
acttttgactactgtawctagctatggatgctg

SEQ ID NO: 11283 - DNA, 33 bp, homo sapiens
agtaattccagataagmaagtgcctcagttatt

SEQ ID NO: 11284 - DNA, 33 bp, homo sapiens
tctctccagcaaagccyacaaagttaaaatcat

SEQ ID NO: 11285 - DNA, 33 bp, homo sapiens
gagtggcttcagttggmaaactacaagaaagag

SEQ ID NO: 11286 - DNA, 33 bp, homo sapiens
tatggcaatcttggctwaccttaaaattgaaat

SEQ ID NO: 11287 - DNA, 33 bp, homo sapiens
tataatcttaattggamgtagaatttacgcaga

SEQ ID NO: 11288 - DNA, 33 bp, homo sapiens
ataccaatttgttgcayggaaatttttgtttaa

SEQ ID NO: 11289 - DNA, 33 bp, homo sapiens
ttcagcttctgcaaacygacaactaatgactta

SEQ ID NO: 11290 - DNA, 33 bp, homo sapiens
tccaattaaagggcacrgagttgatatttatgc

SEQ ID NO: 11291 - DNA, 33 bp, homo sapiens
attgatagatgaggacractacaaaacatatat

SEQ ID NO: 11292 - DNA, 33 bp, homo sapiens
tacccactgggagatamcattctaaagggatat

SEQ ID NO: 11293 - DNA, 33 bp, homo sapiens
ttcaagcccttgtgtgmatttgatagagtgaga

SEQ ID NO: 11294 - DNA, 33 bp, homo sapiens
ccccaatcaaggtgacratcaacatgtctttag

SEQ ID NO: 11295 - DNA, 33 bp, homo sapiens
aaaatgctgctgtttayagactgaatttctttt

SEQ ID NO: 11296 - DNA, 33 bp, homo sapiens
ggtgtggatagggatargatgctgaaattttga

SEQ ID NO: 11297 - DNA, 33 bp, homo sapiens
tgatatctgcaaataaygtagaggaagatagga

SEQ ID NO: 11298 - DNA, 33 bp, homo sapiens
attcctggacctgcaaytctaccccacaaatac

SEQ ID NO: 11299 - DNA, 33 bp, homo sapiens
acctacagagaatctamggaatcaagtgcatta

SEQ ID NO: 11300 - DNA, 33 bp, homo sapiens
tgatgggagaggcatcyctgaaggtttctgaca

SEQ ID NO: 11301 - DNA, 33 bp, homo sapiens
tctagaactgcccaagmagaacctatccaccca

SEQ ID NO: 11302 - DNA, 33 bp, homo sapiens
ataaagtgcatactcasgaggggaaaatgataa

SEQ ID NO: 11303 - DNA, 33 bp, homo sapiens
atgtagatatcttgacrcctataataactacag

SEQ ID NO: 11304 - DNA, 33 bp, homo sapiens
tactcattccgagggaytaaaaaagactaagcc

SEQ ID NO: 11305 - DNA, 33 bp, homo sapiens
ttggtgtacttaaagcratcatgaagataatat

SEQ ID NO: 11306 - DNA, 33 bp, homo sapiens
cttgagcatgagtgtasattcagagatgaattt

SEQ ID NO: 11307 - DNA, 33 bp, homo sapiens
accccagaagatcacargtggccaaggtgggag

SEQ ID NO: 11308 - DNA, 33 bp, homo sapiens
ttagctgcttgagggartatcaaagaaaagtag

SEQ ID NO: 11309 - DNA, 33 bp, homo sapiens
caacagtattatgtgartcacaaggcattcttc

SEQ ID NO: 11310 - DNA, 33 bp, homo sapiens
gagtataaagaagataycatggaaggttaatta

SEQ ID NO: 11311 - DNA, 33 bp, homo sapiens
aatgcacctgttactckattgcttgcttcacta

SEQ ID NO: 11312 - DNA, 33 bp, homo sapiens
tttcacatttaagccarggcagacctaaatgat

SEQ ID NO: 11313 - DNA, 33 bp, homo sapiens
atatagaaaaaaattayaactggtgccacagaa

SEQ ID NO: 11314 - DNA, 33 bp, homo sapiens
tgataatcttcactacrcaaaataatcagggga

SEQ ID NO: 11315 - DNA, 33 bp, homo sapiens
catgtatgtgattgtcyctgcttaacaatgaat

SEQ ID NO: 11316 - DNA, 33 bp, homo sapiens
aaatgaattcccaccawtgcccacagtatttca

SEQ ID NO: 11317 - DNA, 33 bp, homo sapiens
aaattacatacttgatragataaaccaatgtat

SEQ ID NO: 11318 - DNA, 33 bp, homo sapiens
aacattgtaacacttawcttttgcaccttgttt

SEQ ID NO: 11319 - DNA, 33 bp, homo sapiens
tttcctaacatctaacrcacactatagtttcct

SEQ ID NO: 11320 - DNA, 33 bp, homo sapiens
agagcaattttccagtyaatgtattcacagata

SEQ ID NO: 11321 - DNA, 33 bp, homo sapiens
tatttcactggtttcargttggcagattttgtc

SEQ ID NO: 11322 - DNA, 33 bp, homo sapiens
ttaacccaacattgatmataggcacaaatgtga

SEQ ID NO: 11323 - DNA, 33 bp, homo sapiens
tgggaagatagaggccraagctttctccccttt

SEQ ID NO: 11324 - DNA, 33 bp, homo sapiens
tggtagttgtgggataygcatttttcacagacc

SEQ ID NO: 11325 - DNA, 33 bp, homo sapiens
ctgcaatcagagaacasgattacaggctctcat

SEQ ID NO: 11326 - DNA, 33 bp, homo sapiens
gactgagaaaggagaaygggggaagtatgaagg

SEQ ID NO: 11327 - DNA, 33 bp, homo sapiens
gcatatgtaccctatargattcaacagtcatct

SEQ ID NO: 11328 - DNA, 33 bp, homo sapiens
attcgctctatggataygccaaaaatttcctat

SEQ ID NO: 11329 - DNA, 33 bp, homo sapiens
aggcagagggtgtctamatgacagttccacaac

SEQ ID NO: 11330 - DNA, 33 bp, homo sapiens
taattactctcaggctkaaagatcacttcagtc

SEQ ID NO: 11331 - DNA, 33 bp, homo sapiens
tccaccaaggtggaccsaactagaagacatcta

SEQ ID NO: 11332 - DNA, 33 bp, homo sapiens
cagtgactgtatcaaartggccctgttgccttc

SEQ ID NO: 11333 - DNA, 33 bp, homo sapiens
acttagacgattttcaraagaagagatacacac

SEQ ID NO: 11334 - DNA, 33 bp, homo sapiens
ggactaattgccataayacatggttattgatgc

SEQ ID NO: 11335 - DNA, 33 bp, homo sapiens
cagccagacattggtgmaaacacatcaatcatc

SEQ ID NO: 11336 - DNA, 33 bp, homo sapiens
taggcattgtcatgagrccttagctcctggaac

SEQ ID NO: 11337 - DNA, 33 bp, homo sapiens
aactcttttctgaaaarccctttgataatgatg

SEQ ID NO: 11338 - DNA, 33 bp, homo sapiens
tctggcagttatttgayattggaacagcaccat

SEQ ID NO: 11339 - DNA, 33 bp, homo sapiens
gttctaacacaactaayaacactgtcagctttt

SEQ ID NO: 11340 - DNA, 33 bp, homo sapiens
tgctgcatatataataraacagtgataacaaca

SEQ ID NO: 11341 - DNA, 33 bp, homo sapiens
gggaagtgattgactaygtggtaccctttccct

SEQ ID NO: 11342 - DNA, 33 bp, homo sapiens
agaaggtcacagtttaygttgaataatccaact

SEQ ID NO: 11343 - DNA, 33 bp, homo sapiens
attataacaaaatttcrcaaactgggtgactta

SEQ ID NO: 11344 - DNA, 33 bp, homo sapiens
tcttaatttgcttacaytgaggtcagcttgctt

SEQ ID NO: 11345 - DNA, 33 bp, homo sapiens
ctctccataggttagayggtgaaacagccttgg

SEQ ID NO: 11346 - DNA, 33 bp, homo sapiens
cagctccagccaccaarttaacatctaaggcag

SEQ ID NO: 11347 - DNA, 33 bp, homo sapiens
aaatccatttacatgartatggggcaatacagg

SEQ ID NO: 11348 - DNA, 33 bp, homo sapiens
gtggatccctaacagarcttcttccttgtggaa

SEQ ID NO: 11349 - DNA, 33 bp, homo sapiens
tctgaatgttgatatckcttacaaattcatagt

SEQ ID NO: 11350 - DNA, 33 bp, homo sapiens
tagcccagtggattccwatgttctgaacaaaca

SEQ ID NO: 11351 - DNA, 33 bp, homo sapiens
ctcaacctggaagaggwccgtcaacagaaaccc

SEQ ID NO: 11352 - DNA, 33 bp, homo sapiens
aaaacacaaagagttcrcatatacctccacacc

SEQ ID NO: 11353 - DNA, 33 bp, homo sapiens
accaagtcagttttcasagaattagaaaaacta

SEQ ID NO: 11354 - DNA, 33 bp, homo sapiens
cacacatacagataatyagtctggattacttta

SEQ ID NO: 11355 - DNA, 33 bp, homo sapiens
ggacacacttccttcayaggcctgcattttgta

SEQ ID NO: 11356 - DNA, 33 bp, homo sapiens
gatagaagacagagatsaccggaaaggtgcaaa

SEQ ID NO: 11357 - DNA, 33 bp, homo sapiens
aagtgagaaatgaggcrccgagtcataatagtt

SEQ ID NO: 11358 - DNA, 33 bp, homo sapiens
tgcattatactcattcraagtctacagtttaca

SEQ ID NO: 11359 - DNA, 33 bp, homo sapiens
agtatgaaacattatcwagtctgaagctgctat

SEQ ID NO: 11360 - DNA, 33 bp, homo sapiens
acttcttaaggctgaaytgagtgctccagtgtc

SEQ ID NO: 11361 - DNA, 33 bp, homo sapiens
cttgaaaagctggatgmaatactatctcgcttc

SEQ ID NO: 11362 - DNA, 33 bp, homo sapiens
acaagttagaggtttakagaccattacaagcta

SEQ ID NO: 11363 - DNA, 33 bp, homo sapiens
aaatgacttcctaactsaaggccaggtctgact

SEQ ID NO: 11364 - DNA, 33 bp, homo sapiens
acatgaatagtatgaaytgaaaacaatccttgt

SEQ ID NO: 11365 - DNA, 33 bp, homo sapiens
tagacaacagtggaatkattaggtctgatttta

SEQ ID NO: 11366 - DNA, 33 bp, homo sapiens
aatatgttctagtgcaytaaccctccattgatt

SEQ ID NO: 11367 - DNA, 33 bp, homo sapiens
tgagcgattatgtctcyaaaggctgatattcat

SEQ ID NO: 11368 - DNA, 33 bp, homo sapiens
gcattttgtaatacackcattagaggctcaaaa

SEQ ID NO: 11369 - DNA, 33 bp, homo sapiens
caacaagcgctttcccygagtcacagccatttg

SEQ ID NO: 11370 - DNA, 33 bp, homo sapiens
tcaatcctgacgtctgscaagtgtggagatgaa

SEQ ID NO: 11371 - DNA, 33 bp, homo sapiens
ggaaagtaggtcacgayataaagggtcaaataa

SEQ ID NO: 11372 - DNA, 33 bp, homo sapiens
cacagatgcccgctgcrctggttcagagaagga

SEQ ID NO: 11373 - DNA, 33 bp, homo sapiens
cccaggacacaaaaacygagtttgctttcttca

SEQ ID NO: 11374 - DNA, 33 bp, homo sapiens
cttttacctgggaaacygcaatgagacctagct

SEQ ID NO: 11375 - DNA, 33 bp, homo sapiens
ggatgtctctgcaagawaattaaacttccacct

SEQ ID NO: 11376 - DNA, 33 bp, homo sapiens
agcaagtgcaaagccartgagaactgagtgtaa

SEQ ID NO: 11377 - DNA, 33 bp, homo sapiens
tctccctgtgatcagcrcaacctgaaatggagg

SEQ ID NO: 11378 - DNA, 33 bp, homo sapiens
cttcctcttactttccrgaatgccctactctgt

SEQ ID NO: 11379 - DNA, 33 bp, homo sapiens
gggcgctgtgtcttaartcccaccggcttctcc

SEQ ID NO: 11380 - DNA, 33 bp, homo sapiens
gcaagttatagatacgyacatgttgacaagaac

SEQ ID NO: 11381 - DNA, 33 bp, homo sapiens
aaatcctctttgtctcwgaacaacaaacagaat

SEQ ID NO: 11382 - DNA, 33 bp, homo sapiens
aggtgctgggaatgcarcaacgaacaggtcctg

SEQ ID NO: 11383 - DNA, 33 bp, homo sapiens
ataaacaccagcttaaraaaatcaaacttaata

SEQ ID NO: 11384 - DNA, 33 bp, homo sapiens
aatataaacaacaggayacaaagccttaagtca

SEQ ID NO: 11385 - DNA, 33 bp, homo sapiens
ataggggcttgagaaaycacagtacttgtccac

SEQ ID NO: 11386 - DNA, 33 bp, homo sapiens
tttccctctcaccctcyagtcggccttctctca

SEQ ID NO: 11387 - DNA, 33 bp, homo sapiens
actctgtccttgcaaakaactctccttagtgcc

SEQ ID NO: 11388 - DNA, 33 bp, homo sapiens
gaaaggatttttttccrgccactgcaaacagga

SEQ ID NO: 11389 - DNA, 33 bp, homo sapiens
ctgtcgtgtgctgagaygcacttccaacagctt

SEQ ID NO: 11390 - DNA, 33 bp, homo sapiens
cttgttttgtagtaagractcagagcttaaggg

SEQ ID NO: 11391 - DNA, 33 bp, homo sapiens
atactatgctattgaamgtgtgggtagacatga

SEQ ID NO: 11392 - DNA, 33 bp, homo sapiens
gctttttaaataaaaartggatctgtccaaaag

SEQ ID NO: 11393 - DNA, 33 bp, homo sapiens
cagttaccaaaagtgayaatgtgcttggccttt

SEQ ID NO: 11394 - DNA, 33 bp, homo sapiens
cctattttgaatgttcmcgcattactcctattt

SEQ ID NO: 11395 - DNA, 33 bp, homo sapiens
gaggtggggaagtgcayatgagaaagctgttag

SEQ ID NO: 11396 - DNA, 33 bp, homo sapiens
actgctttgttgctgcygatctgggttggctag

SEQ ID NO: 11397 - DNA, 33 bp, homo sapiens
ccctctttcttggcaayaatacgagtccaattc

SEQ ID NO: 11398 - DNA, 33 bp, homo sapiens
ttttctttctctctcarcagaacaacagagcag

SEQ ID NO: 11399 - DNA, 33 bp, homo sapiens
atattaactccagtgarcctaaatagatggaac

SEQ ID NO: 11400 - DNA, 33 bp, homo sapiens
tatacctctgagtgtcrgaaagattttgatttt

SEQ ID NO: 11401 - DNA, 33 bp, homo sapiens
tttgaattctccttaakctggtaagaaagcaaa

SEQ ID NO: 11402 - DNA, 33 bp, homo sapiens
aggttgatgaaaacackggatttgtcttctcac

SEQ ID NO: 11403 - DNA, 33 bp, homo sapiens
aatgatgagtagaatcragacaagaatacaggt

SEQ ID NO: 11404 - DNA, 33 bp, homo sapiens
tctgaaaactgaattayccagcacatcctgcac

SEQ ID NO: 11405 - DNA, 33 bp, homo sapiens
taaaacaatgacataamagaacaagcattaatc

SEQ ID NO: 11406 - DNA, 33 bp, homo sapiens
aagcagtgagctaacaktaatgacctggtaggt

SEQ ID NO: 11407 - DNA, 33 bp, homo sapiens
tcatttacaagttagamgtattgacagaataga

SEQ ID NO: 11408 - DNA, 33 bp, homo sapiens
gaaaagctatgacgtgyaatttttggcactaga

SEQ ID NO: 11409 - DNA, 33 bp, homo sapiens
gcaaggatttgagggaratttgtcttcaggtgg

SEQ ID NO: 11410 - DNA, 33 bp, homo sapiens
aaagctcagctaacatsatcacaagacaccagc

SEQ ID NO: 11411 - DNA, 33 bp, homo sapiens
atattctttttgaagcsccagtcattaatcaaa

SEQ ID NO: 11412 - DNA, 33 bp, homo sapiens
ttgtgatgtgtcttggmatagatttttcgagtt

SEQ ID NO: 11413 - DNA, 33 bp, homo sapiens
tatccaagtgatgtgcyacttacaatggtttta

SEQ ID NO: 11414 - DNA, 33 bp, homo sapiens
ccatcagattttccackgagttcgttcaaaagt

SEQ ID NO: 11415 - DNA, 33 bp, homo sapiens
cttatccaaaaagcagsaagttctcactttagt

SEQ ID NO: 11416 - DNA, 33 bp, homo sapiens
ggttctacatgagaaaygtggtatataaatgta

SEQ ID NO: 11417 - DNA, 33 bp, homo sapiens
tatgtaatagtttaccrcattatttcagccttc

SEQ ID NO: 11418 - DNA, 33 bp, homo sapiens
ttctcaggcaaggttarggaggaaacgtggtca

SEQ ID NO: 11419 - DNA, 33 bp, homo sapiens
aatgtcaccaatattaygccttagcaaagaact

SEQ ID NO: 11420 - DNA, 33 bp, homo sapiens
ataccccacttgtggcrccgattttctgtatta

SEQ ID NO: 11421 - DNA, 33 bp, homo sapiens
ccgtccaattgcaaccrgaactactcaattgac

SEQ ID NO: 11422 - DNA, 33 bp, homo sapiens
acatctttattaagtgycaagtgtttatcttac

SEQ ID NO: 11423 - DNA, 33 bp, homo sapiens
gttaactaaattctaaygcaaaacatgacaaaa

SEQ ID NO: 11424 - DNA, 33 bp, homo sapiens
ttaaaatcatgtatgcrcaaatctgtgtgactg

SEQ ID NO: 11425 - DNA, 33 bp, homo sapiens
acgtaattgtaaatatrggattaaagtgcaagt

SEQ ID NO: 11426 - DNA, 33 bp, homo sapiens
aaccctaacacttcaayggcgcaggggcaaaat

SEQ ID NO: 11427 - DNA, 33 bp, homo sapiens
atctggtctctttgaaraaacatccaatcccaa

SEQ ID NO: 11428 - DNA, 33 bp, homo sapiens
cgtggactccttcaaaytggctcttgctttatt

SEQ ID NO: 11429 - DNA, 33 bp, homo sapiens
ctcattcgggtaaaaaytatggacagtcagtga

SEQ ID NO: 11430 - DNA, 33 bp, homo sapiens
aacaaattcttacttcraatgactagaatcatt

SEQ ID NO: 11431 - DNA, 33 bp, homo sapiens
tgccatcaatcatagcrcaagaaaactgtttaa

SEQ ID NO: 11432 - DNA, 33 bp, homo sapiens
tacccactgtatcaaaytccttctctattacat

SEQ ID NO: 11433 - DNA, 33 bp, homo sapiens
atgtttaccccttaaarctgatactgactgccc

SEQ ID NO: 11434 - DNA, 33 bp, homo sapiens
gcacaatctcatagcamtatacacctatttgaa

SEQ ID NO: 11435 - DNA, 33 bp, homo sapiens
atatgtgagaatagaargtaaaagtggagaata

SEQ ID NO: 11436 - DNA, 33 bp, homo sapiens
gtgcctcagcgccaaayaggatccaggcctccg

SEQ ID NO: 11437 - DNA, 33 bp, homo sapiens
actaagaaataatgaamaagaaccacgtaggaa

SEQ ID NO: 11438 - DNA, 33 bp, homo sapiens
ttcagaaaatggaatawgttagtacttgcatta

SEQ ID NO: 11439 - DNA, 33 bp, homo sapiens
cacaaagataacctaarcaaccaatcaaggcaa

SEQ ID NO: 11440 - DNA, 33 bp, homo sapiens
gagatctgagtgctaasatctttacattatctc

SEQ ID NO: 11441 - DNA, 33 bp, homo sapiens
gtattaagactgatcaytatacttcctgggtag

SEQ ID NO: 11442 - DNA, 33 bp, homo sapiens
aagtcagcctcagataygacccaagggatacgt

SEQ ID NO: 11443 - DNA, 33 bp, homo sapiens
tgccagcatttaggagraaaacctggaaatcag

SEQ ID NO: 11444 - DNA, 33 bp, homo sapiens
aatatcttggagtatgragaaaatccattcaac

SEQ ID NO: 11445 - DNA, 33 bp, homo sapiens
ttttagcgtttgtttgragataatgccaaccaa

SEQ ID NO: 11446 - DNA, 33 bp, homo sapiens
aaggcattgctcagcgyattcctctgctagggg

SEQ ID NO: 11447 - DNA, 33 bp, homo sapiens
ttagagctggcagaaayggatctaataaaatgt

SEQ ID NO: 11448 - DNA, 33 bp, homo sapiens
catgttagccatgagaycgtgataatactacag

SEQ ID NO: 11449 - DNA, 33 bp, homo sapiens
taccaagtcactattayagagccaatccagatg

SEQ ID NO: 11450 - DNA, 33 bp, homo sapiens
ggcacggaggcctctcrcgtctttacacttgcc

SEQ ID NO: 11451 - DNA, 33 bp, homo sapiens
cgaagtcacatccagartccagaggaaggcaca

SEQ ID NO: 11452 - DNA, 33 bp, homo sapiens
atgtcttcacgttacaygaggatttctgtttta

SEQ ID NO: 11453 - DNA, 33 bp, homo sapiens
tccctatgttccttgaygtcattgattgatccc

SEQ ID NO: 11454 - DNA, 33 bp, homo sapiens
tagtacaatcaggtacmcttttccaaaacagca

SEQ ID NO: 11455 - DNA, 33 bp, homo sapiens
tcccacaagcacagggkataatttaagtatctc

SEQ ID NO: 11456 - DNA, 33 bp, homo sapiens
aagcagtagctggtgarggaaacgcgcagcaga

SEQ ID NO: 11457 - DNA, 33 bp, homo sapiens
ctcattcacatgttcargatgggtgaatttcta

SEQ ID NO: 11458 - DNA, 33 bp, homo sapiens
ttaagtcaatgagaccrgagttaaagagattca

SEQ ID NO: 11459 - DNA, 33 bp, homo sapiens
tcattatgataaaccaygctgtaatggaaatat

SEQ ID NO: 11460 - DNA, 33 bp, homo sapiens
ttcctgcaagttcccaygatgccgacactgctg

SEQ ID NO: 11461 - DNA, 33 bp, homo sapiens
caacagtttgaagctaytaataatctttagtat

SEQ ID NO: 11462 - DNA, 33 bp, homo sapiens
ttttgaaagcagtgggraaaattcacagactga

SEQ ID NO: 11463 - DNA, 33 bp, homo sapiens
ccttgctgtggaaagaygctactgaaagtataa

SEQ ID NO: 11464 - DNA, 33 bp, homo sapiens
tctcctttagtccgtakaaactcaatgctctag

SEQ ID NO: 11465 - DNA, 33 bp, homo sapiens
tagtggcttttatcggratctcataaatagctg

SEQ ID NO: 11466 - DNA, 33 bp, homo sapiens
gatgaaattgaaacatragtaacacgattcaat

SEQ ID NO: 11467 - DNA, 33 bp, homo sapiens
tccttaaacagatatgsaaattttatgtactct

SEQ ID NO: 11468 - DNA, 33 bp, homo sapiens
gagtacaatggcaataygttttacaacagtaaa

SEQ ID NO: 11469 - DNA, 33 bp, homo sapiens
tttctattctgaaatayaggtgaacacactcgt

SEQ ID NO: 11470 - DNA, 33 bp, homo sapiens
ttgactactctagatamcttacattaatggaat

SEQ ID NO: 11471 - DNA, 33 bp, homo sapiens
attcgtggaagcacacyggcttacccaagtacc

SEQ ID NO: 11472 - DNA, 33 bp, homo sapiens
tatgtacaggaaaatamcaattcattgtcaaaa

SEQ ID NO: 11473 - DNA, 33 bp, homo sapiens
cgcacctgcactccagratgttgactggggtct

SEQ ID NO: 11474 - DNA, 33 bp, homo sapiens
aagaaacaagcacattmaactcatttctcgcat

SEQ ID NO: 11475 - DNA, 33 bp, homo sapiens
tgacttgagaatgtgarggcacaccgggcaagt

SEQ ID NO: 11476 - DNA, 33 bp, homo sapiens
acagaaaccaggcatcrctaacacaggaagtgt

SEQ ID NO: 11477 - DNA, 33 bp, homo sapiens
agggccgggtctttgcratcagacgggcttagg

SEQ ID NO: 11478 - DNA, 33 bp, homo sapiens
ctgcaaatcaaaaagawataaacacgatagaaa

SEQ ID NO: 11479 - DNA, 33 bp, homo sapiens
gtctttaggtaccacaygtgaagtctgatggtg

SEQ ID NO: 11480 - DNA, 33 bp, homo sapiens
tctcctggcattgaggwcaaaatttccaatgat

SEQ ID NO: 11481 - DNA, 33 bp, homo sapiens
aaggagaagtgacttarctgaagctttgggaga

SEQ ID NO: 11482 - DNA, 33 bp, homo sapiens
aattactaaactgtctmaaaatcgaccaaaatc

SEQ ID NO: 11483 - DNA, 33 bp, homo sapiens
atctttttctgagcagyagaccttaataggagg

SEQ ID NO: 11484 - DNA, 33 bp, homo sapiens
ctccccgtggaaacacyggttgatagtctcagc

SEQ ID NO: 11485 - DNA, 33 bp, homo sapiens
atatgtataaaacttcrcctaacaatagcagaa

SEQ ID NO: 11486 - DNA, 33 bp, homo sapiens
tgtccagtgtcatgaargtttgtaagtgggaag

SEQ ID NO: 11487 - DNA, 33 bp, homo sapiens
attagaccggcctgcgraaagcaacaaaacaat

SEQ ID NO: 11488 - DNA, 33 bp, homo sapiens
ttctctttggggctacrcgtttctccttggact

SEQ ID NO: 11489 - DNA, 33 bp, homo sapiens
actttttcctggttacyggctggaggaggtgag

SEQ ID NO: 11490 - DNA, 33 bp, homo sapiens
tacttgacttcttgatsaactttcttccctgtc

SEQ ID NO: 11491 - DNA, 33 bp, homo sapiens
gaagacaacaacgataygaactttatgatgatg

SEQ ID NO: 11492 - DNA, 33 bp, homo sapiens
ttcacttgatacctagmaaaagacttgttaata

SEQ ID NO: 11493 - DNA, 33 bp, homo sapiens
actttttctgtttatcraagtgatagattagct

SEQ ID NO: 11494 - DNA, 33 bp, homo sapiens
aaatagccagttcatasatagtttcctatatac

SEQ ID NO: 11495 - DNA, 33 bp, homo sapiens
ggggtttggacttcaargtttcttcatccccaa

SEQ ID NO: 11496 - DNA, 33 bp, homo sapiens
tgacacatgaaacagamgaatcatctagtggaa

SEQ ID NO: 11497 - DNA, 33 bp, homo sapiens
gtttacaagtgtgtagyaccttctgcctcactc

SEQ ID NO: 11498 - DNA, 33 bp, homo sapiens
cttaatactccatttaracttgtcagaatttaa

SEQ ID NO: 11499 - DNA, 33 bp, homo sapiens
ctcagaagatgctgacraagacccagacaggaa

SEQ ID NO: 11500 - DNA, 33 bp, homo sapiens
cctcttggatgactcaratatcaccttgcaaac

SEQ ID NO: 11501 - DNA, 33 bp, homo sapiens
tattcattctaccttcrccgaagagtcctacag

SEQ ID NO: 11502 - DNA, 33 bp, homo sapiens
ctttgaaggatagaatsacacggttggtctgtt

SEQ ID NO: 11503 - DNA, 33 bp, homo sapiens
ctcccttttctagcctkacccacagaggcagaa

SEQ ID NO: 11504 - DNA, 33 bp, homo sapiens
caatgagcccaaaataytacttaatccctaatt

SEQ ID NO: 11505 - DNA, 33 bp, homo sapiens
catgaggtggctcttasgttcctctaattcttg

SEQ ID NO: 11506 - DNA, 33 bp, homo sapiens
aaaaaattctcatcagraagaaattacttataa

SEQ ID NO: 11507 - DNA, 33 bp, homo sapiens
agaaataattcaaagcyccatctgtataactgt

SEQ ID NO: 11508 - DNA, 33 bp, homo sapiens
aaaggataccatgctasgtgctataaacaaaat

SEQ ID NO: 11509 - DNA, 33 bp, homo sapiens
atgtttggatactggtraagttcttaatatgga

SEQ ID NO: 11510 - DNA, 33 bp, homo sapiens
aattcacataaggaaasagcatctgagcaacca

SEQ ID NO: 11511 - DNA, 33 bp, homo sapiens
agaggaaatgtgcttcraagagtgcttggaaag

SEQ ID NO: 11512 - DNA, 33 bp, homo sapiens
gatgcagttccaggaaygcactgtcataagagt

SEQ ID NO: 11513 - DNA, 33 bp, homo sapiens
ccctcatcctcttttcraaaactcctcgaaccc

SEQ ID NO: 11514 - DNA, 33 bp, homo sapiens
tgtgtcaaacacccacygaatccatctctcaga

SEQ ID NO: 11515 - DNA, 33 bp, homo sapiens
gatagaacaaagtccaratattatctatgcagt

SEQ ID NO: 11516 - DNA, 33 bp, homo sapiens
tagagagggggtttcaygatccgcccatcttag

SEQ ID NO: 11517 - DNA, 33 bp, homo sapiens
acacactcatcaactaygtgggcttcatcaact

SEQ ID NO: 11518 - DNA, 33 bp, homo sapiens
cactgaactctcttcayataaacattttaccca

SEQ ID NO: 11519 - DNA, 33 bp, homo sapiens
gtggtggatgctggaaytctggacgctccattc

SEQ ID NO: 11520 - DNA, 33 bp, homo sapiens
tgtgaggatggaatgargtcatacagattgcgc

SEQ ID NO: 11521 - DNA, 33 bp, homo sapiens
aatattatcagctttayggaattttgtgatgat

SEQ ID NO: 11522 - DNA, 33 bp, homo sapiens
gtagttgcaagcctgtyaattctatttcttagc

SEQ ID NO: 11523 - DNA, 33 bp, homo sapiens
agacttgttgtaaaacyaagtgtaatatggttg

SEQ ID NO: 11524 - DNA, 33 bp, homo sapiens
ctggacctgacatttayggattcatccaaggga

SEQ ID NO: 11525 - DNA, 33 bp, homo sapiens
actgaagccaagtcaamcttcttgtacttccaa

SEQ ID NO: 11526 - DNA, 33 bp, homo sapiens
atgctgaacttacaatraagttatggtccaata

SEQ ID NO: 11527 - DNA, 33 bp, homo sapiens
caaagtaagtccacacygataaggcacctagaa

SEQ ID NO: 11528 - DNA, 33 bp, homo sapiens
tgcacaggaatgtgagrccctctatgacctaat

SEQ ID NO: 11529 - DNA, 33 bp, homo sapiens
agccagtacagtgaatsacctccttgaggggcc

SEQ ID NO: 11530 - DNA, 33 bp, homo sapiens
cagaaagattcgttaarcttgccaaatgcagta

SEQ ID NO: 11531 - DNA, 33 bp, homo sapiens
gctgaatatgtgataaygtaattagtattcctg

SEQ ID NO: 11532 - DNA, 33 bp, homo sapiens
ctgaatgaaacaaagamctctatcattgtcaat

SEQ ID NO: 11533 - DNA, 33 bp, homo sapiens
aagaaaacggtttaacyatgctttcatatttta

SEQ ID NO: 11534 - DNA, 33 bp, homo sapiens
cacacaaagttggcaartactaacaattctata

SEQ ID NO: 11535 - DNA, 33 bp, homo sapiens
ttgggaagaaattcacraccttttagtcaatgt

SEQ ID NO: 11536 - DNA, 33 bp, homo sapiens
gttcttcaaccgtatgkatagtctgttaacata

SEQ ID NO: 11537 - DNA, 33 bp, homo sapiens
ttattataaactcaggycagaaacaaattatgt

SEQ ID NO: 11538 - DNA, 33 bp, homo sapiens
gagggcagagtttgtayataatttgttcagcat

SEQ ID NO: 11539 - DNA, 33 bp, homo sapiens
gatgggtttctgtatgraaatctgaatatatta

SEQ ID NO: 11540 - DNA, 33 bp, homo sapiens
aaattgagggtgaaacygacacttaacaatgtg

SEQ ID NO: 11541 - DNA, 33 bp, homo sapiens
gaaattttcctcctgaygtttcctatgatacat

SEQ ID NO: 11542 - DNA, 33 bp, homo sapiens
ttcacggccatctgaartgttaaacagtggctt

SEQ ID NO: 11543 - DNA, 33 bp, homo sapiens
tgaagaatatttccagyctcatctaggacaata

SEQ ID NO: 11544 - DNA, 33 bp, homo sapiens
cgtgactttgagcaagsattgcaggagctctaa

SEQ ID NO: 11545 - DNA, 33 bp, homo sapiens
aaacagttcaacttcargcacattgctaaatgc

SEQ ID NO: 11546 - DNA, 33 bp, homo sapiens
gagtagaggaaggagcrgaaatgttaactttag

SEQ ID NO: 11547 - DNA, 33 bp, homo sapiens
gctatggcagtcatcaratcattcctctattgt

SEQ ID NO: 11548 - DNA, 33 bp, homo sapiens
aatgttcctaagcagarggaatgagtaaaacca

SEQ ID NO: 11549 - DNA, 33 bp, homo sapiens
ttaatggttaaaccaayttgggcagaaacactg

SEQ ID NO: 11550 - DNA, 33 bp, homo sapiens
ggacccgaatacattcycattgctggctccagc

SEQ ID NO: 11551 - DNA, 33 bp, homo sapiens
gaaaggaagtggcctgragaatttattgagcaa

SEQ ID NO: 11552 - DNA, 33 bp, homo sapiens
atctgtgcagctgtggrcatatcttaggtaagc

SEQ ID NO: 11553 - DNA, 33 bp, homo sapiens
gagtcaccctacccaayattggatgagagagct

SEQ ID NO: 11554 - DNA, 33 bp, homo sapiens
aagcagttatttttcarcaggagaaaatgcagc

SEQ ID NO: 11555 - DNA, 33 bp, homo sapiens
atctgctgagcaactayaggaaataatgtttgc

SEQ ID NO: 11556 - DNA, 33 bp, homo sapiens
aagaggaagacagaaaygtgactttgggctcat

SEQ ID NO: 11557 - DNA, 33 bp, homo sapiens
agtctgaaagttgttamatcaagtcgcattgtg

SEQ ID NO: 11558 - DNA, 33 bp, homo sapiens
gcaataaatcactgtaycactgggaactcagtg

SEQ ID NO: 11559 - DNA, 33 bp, homo sapiens
ccagttaaaagggccargagtgaaagccgagct

SEQ ID NO: 11560 - DNA, 33 bp, homo sapiens
actgcttaatgcgggamtaattagtatatcccc

SEQ ID NO: 11561 - DNA, 33 bp, homo sapiens
gtccttgaaacaggcasaacatcttacatgcct

SEQ ID NO: 11562 - DNA, 33 bp, homo sapiens
ctcaaactgtgagctayaggtcaggttctggcc

SEQ ID NO: 11563 - DNA, 33 bp, homo sapiens
tttttgacttaaaaaamaatgcccagtgatctc

SEQ ID NO: 11564 - DNA, 33 bp, homo sapiens
tggacatggctgcataygtgtctagagcacata

SEQ ID NO: 11565 - DNA, 33 bp, homo sapiens
ctgttgtgtagattatyacgtatttacatacac

SEQ ID NO: 11566 - DNA, 33 bp, homo sapiens
ggcagatctttgggggraaacctgccttttgag

SEQ ID NO: 11567 - DNA, 33 bp, homo sapiens
cctagatctagctgccragtcacagggaataca

SEQ ID NO: 11568 - DNA, 33 bp, homo sapiens
gaaactacaactggaayagaggaatcctaaagt

SEQ ID NO: 11569 - DNA, 33 bp, homo sapiens
tctaaaagactgcacamaaaaaccaccataaat

SEQ ID NO: 11570 - DNA, 33 bp, homo sapiens
aggtgatcttacagtawctaaacactagagtaa

SEQ ID NO: 11571 - DNA, 33 bp, homo sapiens
tttctgcgggagcacartgtaggtcagatagca

SEQ ID NO: 11572 - DNA, 33 bp, homo sapiens
ccaattgtcacgtaacrggtcatgtggattcag

SEQ ID NO: 11573 - DNA, 33 bp, homo sapiens
ccccaaatctcataacrccaacattttgaacat

SEQ ID NO: 11574 - DNA, 33 bp, homo sapiens
aaaaggattacggaaaratgattatagctagag

SEQ ID NO: 11575 - DNA, 33 bp, homo sapiens
caattcatagtcattawggaaagttaaaatatg

SEQ ID NO: 11576 - DNA, 33 bp, homo sapiens
cacatatgtgaatgtascacagcttgtttacta

SEQ ID NO: 11577 - DNA, 33 bp, homo sapiens
ttttgatgcatattatsacttgtgtctgagaac

SEQ ID NO: 11578 - DNA, 33 bp, homo sapiens
tttatgtagtgatatcyaagtgtatgttattca

SEQ ID NO: 11579 - DNA, 33 bp, homo sapiens
tctaaatccagctgtakcattctagatcagtgc

SEQ ID NO: 11580 - DNA, 33 bp, homo sapiens
gacatatagattttaamcagtcaaagaacatct

SEQ ID NO: 11581 - DNA, 33 bp, homo sapiens
agaaactcatggcagaraggaaagagttttttt

SEQ ID NO: 11582 - DNA, 33 bp, homo sapiens
tttctcctacactgtargttgtctcattattgt

SEQ ID NO: 11583 - DNA, 33 bp, homo sapiens
caccacagggatccaamgagagggcggccaaag

SEQ ID NO: 11584 - DNA, 33 bp, homo sapiens
tacttggggtttagagwaattgcatcttggtag

SEQ ID NO: 11585 - DNA, 33 bp, homo sapiens
aaatactgaaaatacaraagtagtgaattatct

SEQ ID NO: 11586 - DNA, 33 bp, homo sapiens
acagatggtgaatgagsataaatgtgtaggagt

SEQ ID NO: 11587 - DNA, 33 bp, homo sapiens
caaaacaacctgtccarcataatttatgattct

SEQ ID NO: 11588 - DNA, 33 bp, homo sapiens
agccacaacattttaargaatcattttggctgc

SEQ ID NO: 11589 - DNA, 33 bp, homo sapiens
tcctttatgaacaaaamtttccctttaagcatg

SEQ ID NO: 11590 - DNA, 33 bp, homo sapiens
ctgtgcctatagtcaayagtgctgtattagaca

SEQ ID NO: 11591 - DNA, 33 bp, homo sapiens
aaaacaggaatcaaaamaatcaaagcaaaatta

SEQ ID NO: 11592 - DNA, 33 bp, homo sapiens
aactcttcaatctgacyataatcaatatgtttt

SEQ ID NO: 11593 - DNA, 33 bp, homo sapiens
atactaagatgcctaaytatgatttgtgccacc

SEQ ID NO: 11594 - DNA, 33 bp, homo sapiens
tgccaccaaaatgtaarctatcacaataccttc

SEQ ID NO: 11595 - DNA, 33 bp, homo sapiens
atgtctcattttgaggscaggagactacaccag

SEQ ID NO: 11596 - DNA, 33 bp, homo sapiens
agaagtcattggtccaytaaaagcttgaaatca

SEQ ID NO: 11597 - DNA, 33 bp, homo sapiens
ttgtggagtgcttaaayggctttagaaatctct

SEQ ID NO: 11598 - DNA, 33 bp, homo sapiens
gcatcacagtgactgaraggctactaggtccta

SEQ ID NO: 11599 - DNA, 33 bp, homo sapiens
aagtgattttgtcttayaccttgggtaccacct

SEQ ID NO: 11600 - DNA, 33 bp, homo sapiens
atttgacatttgctaaragggtagatcttgagt

SEQ ID NO: 11601 - DNA, 33 bp, homo sapiens
tgtacttgcggtctcaygggtattataacacat

SEQ ID NO: 11602 - DNA, 33 bp, homo sapiens
aggcttactcaacacaygggtttgttcacagga

SEQ ID NO: 11603 - DNA, 33 bp, homo sapiens
gatctgtgtctgaggarggatttatttggataa

SEQ ID NO: 11604 - DNA, 33 bp, homo sapiens
tggttcatttcctttakcaattacgttaacatt

SEQ ID NO: 11605 - DNA, 33 bp, homo sapiens
gcactagctacagaaawtcctaagagtaaaatt

SEQ ID NO: 11606 - DNA, 33 bp, homo sapiens
gctacactggtatatcmaacagactaaaacata

SEQ ID NO: 11607 - DNA, 33 bp, homo sapiens
cattagcatcagacagratccttaggaccaatc

SEQ ID NO: 11608 - DNA, 33 bp, homo sapiens
atacacttaaaagaaamcttagcattctgcatt

SEQ ID NO: 11609 - DNA, 33 bp, homo sapiens
tgcacggcctacatgtraaagagtagtatttgt

SEQ ID NO: 11610 - DNA, 33 bp, homo sapiens
aagatatggacccaagraagctcatagtgatct

SEQ ID NO: 11611 - DNA, 33 bp, homo sapiens
gtgggaaataatcaccraaaagtatgcttgtaa

SEQ ID NO: 11612 - DNA, 33 bp, homo sapiens
gcttcagcattgttgakagttgatgagataatg

SEQ ID NO: 11613 - DNA, 33 bp, homo sapiens
gtattctcttttttaaracactctaatggctta

SEQ ID NO: 11614 - DNA, 33 bp, homo sapiens
cacagtggcactaggargtataggatgcagact

SEQ ID NO: 11615 - DNA, 33 bp, homo sapiens
atttagtgacatagctkaactttaacacacaac

SEQ ID NO: 11616 - DNA, 33 bp, homo sapiens
agttctatgtcagttayctctgttatctgaata

SEQ ID NO: 11617 - DNA, 33 bp, homo sapiens
aatttatatcactgtcraaaagatttataataa

SEQ ID NO: 11618 - DNA, 33 bp, homo sapiens
cttattttgcaggacasagagaaagcctatagt

SEQ ID NO: 11619 - DNA, 33 bp, homo sapiens
ttgccaagaccaatgtkaagttttccttatgtt

SEQ ID NO: 11620 - DNA, 33 bp, homo sapiens
ctttgaaggtgttaaargaaacagtcctataag

SEQ ID NO: 11621 - DNA, 33 bp, homo sapiens
aggaaggtccatctgcrgcaacataggaaggag

SEQ ID NO: 11622 - DNA, 33 bp, homo sapiens
catagagatgactttcrattgtcttttgcctgg

SEQ ID NO: 11623 - DNA, 33 bp, homo sapiens
ctggttcaagattcaawccaaatcctagttttg

SEQ ID NO: 11624 - DNA, 33 bp, homo sapiens
ttgggttgtggacttayctgggggcagttactt

SEQ ID NO: 11625 - DNA, 33 bp, homo sapiens
taaaagcattaaaggcraacaatatttaagtta

SEQ ID NO: 11626 - DNA, 33 bp, homo sapiens
tttagtacaaggttgaygggaatgtgagttagc

SEQ ID NO: 11627 - DNA, 33 bp, homo sapiens
aactgtttcttcagtargctaagtatgaacgtt

SEQ ID NO: 11628 - DNA, 33 bp, homo sapiens
atttggctgcttttccrgagtgattaaaaactt

SEQ ID NO: 11629 - DNA, 33 bp, homo sapiens
cattggtttgcatgatratagaaaatgtccttt

SEQ ID NO: 11630 - DNA, 33 bp, homo sapiens
gactgctaatcgtacartatttcttcttgaagt

SEQ ID NO: 11631 - DNA, 33 bp, homo sapiens
tggcagggggagctaamaagataggaggccaag

SEQ ID NO: 11632 - DNA, 33 bp, homo sapiens
ttcctcagcttttcagyccagaaatgacagtat

SEQ ID NO: 11633 - DNA, 33 bp, homo sapiens
ttcatgggttcgagaartggtaatggggtaaat

SEQ ID NO: 11634 - DNA, 33 bp, homo sapiens
tgtgcaaagcaactatraagcaaggaaggaaat

SEQ ID NO: 11635 - DNA, 33 bp, homo sapiens
aaagtattgagagacaytaaggaagaatcaaaa

SEQ ID NO: 11636 - DNA, 33 bp, homo sapiens
tacctctgtttcctcayagattctaagcttctt

SEQ ID NO: 11637 - DNA, 33 bp, homo sapiens
ttttataaaatgcccaygaaaggctcaatttta

SEQ ID NO: 11638 - DNA, 33 bp, homo sapiens
cttgataactgtattgmaatgtgtcataatatt

SEQ ID NO: 11639 - DNA, 33 bp, homo sapiens
aaatttgctgtaaaagyagtaaatgcaactaac

SEQ ID NO: 11640 - DNA, 33 bp, homo sapiens
aataaatattcgatacrcactggcatgactggc

SEQ ID NO: 11641 - DNA, 33 bp, homo sapiens
gagtgtgaatattggargtttgtttatctctaa

SEQ ID NO: 11642 - DNA, 33 bp, homo sapiens
taggtcctcttgaagasaacagtgatggtacat

SEQ ID NO: 11643 - DNA, 33 bp, homo sapiens
caattctgttacccaartgaaagatcccataat

SEQ ID NO: 11644 - DNA, 33 bp, homo sapiens
ctaaaattgtatgggamcagaatgagatagtag

SEQ ID NO: 11645 - DNA, 33 bp, homo sapiens
caattctgctgccacaktgagtctgctctggtc

SEQ ID NO: 11646 - DNA, 33 bp, homo sapiens
ataggagtgttccagaragctggtgacaaagac

SEQ ID NO: 11647 - DNA, 33 bp, homo sapiens
gatcctgaaaaacctcyagaagaaaggagatgc

SEQ ID NO: 11648 - DNA, 33 bp, homo sapiens
tctttaagcaatgacaytaatccaacaacaatc

SEQ ID NO: 11649 - DNA, 33 bp, homo sapiens
taaataatgaaaaaaakgcatggcacagttttg

SEQ ID NO: 11650 - DNA, 33 bp, homo sapiens
cacaccatcagaggtaygtgttgttattcatgt

SEQ ID NO: 11651 - DNA, 33 bp, homo sapiens
acttaagacaataaagraaaagactggaattct

SEQ ID NO: 11652 - DNA, 33 bp, homo sapiens
cagtgagctttataatraacatcagccaagcac

SEQ ID NO: 11653 - DNA, 33 bp, homo sapiens
atggcctcatttcccaygtgtgtacaaggtggt

SEQ ID NO: 11654 - DNA, 33 bp, homo sapiens
cgaatggggaattataygtgaggtattgtaact

SEQ ID NO: 11655 - DNA, 33 bp, homo sapiens
ggtgattctgaagaccrctgctatatgtcatct

SEQ ID NO: 11656 - DNA, 33 bp, homo sapiens
taaaacaggagttagcraaccacagctcacagg

SEQ ID NO: 11657 - DNA, 33 bp, homo sapiens
ttccttgatttggggasagttatttaacattta

SEQ ID NO: 11658 - DNA, 33 bp, homo sapiens
tggaaatggccttccasaaatggctgataagct

SEQ ID NO: 11659 - DNA, 33 bp, homo sapiens
taggagatagagtatawgctacttgggtatctg

SEQ ID NO: 11660 - DNA, 33 bp, homo sapiens
gctttctggaagtgacraagatgggactccatt

SEQ ID NO: 11661 - DNA, 33 bp, homo sapiens
tgaaaatcattgatagractctaacttcatctt

SEQ ID NO: 11662 - DNA, 33 bp, homo sapiens
gacatgaccactacccratctatgcatataaca

SEQ ID NO: 11663 - DNA, 33 bp, homo sapiens
aaatgtaggtaaaagcrcaggttgtccacagtt

SEQ ID NO: 11664 - DNA, 33 bp, homo sapiens
gtgtgaatatagtgcaygggtaggaagagaatg

SEQ ID NO: 11665 - DNA, 33 bp, homo sapiens
aatgttactaagaagawgcttttgtctgttatt

SEQ ID NO: 11666 - DNA, 33 bp, homo sapiens
cttccagttcccaggaygtgaagttagaagatg

SEQ ID NO: 11667 - DNA, 33 bp, homo sapiens
atgtgaaccaccccaaygtgccactatgaaaca

SEQ ID NO: 11668 - DNA, 33 bp, homo sapiens
ttttttgttggctctaycttttagctggagtgt

SEQ ID NO: 11669 - DNA, 33 bp, homo sapiens
attttgtatgcttttaygaactgctgaagttaa

SEQ ID NO: 11670 - DNA, 33 bp, homo sapiens
tgcttttgtacggaaasaggcagcgagccattt

SEQ ID NO: 11671 - DNA, 33 bp, homo sapiens
gtaactaggcaaagaargagacctctgtaaaat

SEQ ID NO: 11672 - DNA, 33 bp, homo sapiens
agagaaagtaaaatggyattcaggaactacaga

SEQ ID NO: 11673 - DNA, 33 bp, homo sapiens
tgaataaaataagagarctgatcctttatgcaa

SEQ ID NO: 11674 - DNA, 33 bp, homo sapiens
agttacactgtttacasggtttgtagtggcacc

SEQ ID NO: 11675 - DNA, 33 bp, homo sapiens
tgttgatggagaagcgrcaggtcacactgtaaa

SEQ ID NO: 11676 - DNA, 33 bp, homo sapiens
tgaattcatgagatgasagccaatttaaaaaag

SEQ ID NO: 11677 - DNA, 33 bp, homo sapiens
gctcaagacagtgtgayacaacttctttactgc

SEQ ID NO: 11678 - DNA, 33 bp, homo sapiens
tgtcctctgtgacctgsaatcataactttaggg

SEQ ID NO: 11679 - DNA, 33 bp, homo sapiens
caccacaaaacctcaayggcatgcaataataag

SEQ ID NO: 11680 - DNA, 33 bp, homo sapiens
ccccctgtctctgttgwaatcagtgatctctgt

SEQ ID NO: 11681 - DNA, 33 bp, homo sapiens
cctcacatcagcaggasataggaggggtactct

SEQ ID NO: 11682 - DNA, 33 bp, homo sapiens
acaacctagcaacaaarcagttaaagcctgcag

SEQ ID NO: 11683 - DNA, 33 bp, homo sapiens
agtctttcctgataggyacagccggcagcttca

SEQ ID NO: 11684 - DNA, 33 bp, homo sapiens
tgttgtttaaactgacrctggaaggatgataag

SEQ ID NO: 11685 - DNA, 33 bp, homo sapiens
ctttgtgcctccatgaragagataggatatgat

SEQ ID NO: 11686 - DNA, 33 bp, homo sapiens
atcaccgaaaatgtcasgttgtaaactctttct

SEQ ID NO: 11687 - DNA, 33 bp, homo sapiens
ctgagaacttctctccrcagatagacctgagga

SEQ ID NO: 11688 - DNA, 33 bp, homo sapiens
gatggctgccagagcaygagggaagaagaatta

SEQ ID NO: 11689 - DNA, 33 bp, homo sapiens
cttttctagtacctgcyatgaaagacaacacac

SEQ ID NO: 11690 - DNA, 33 bp, homo sapiens
agagactgaaagcttargccaagaacacatcgc

SEQ ID NO: 11691 - DNA, 33 bp, homo sapiens
gattagaaaatgttacwctggtcttccacttat

SEQ ID NO: 11692 - DNA, 33 bp, homo sapiens
caattggtactctttamaaaagtcatgaaacca

SEQ ID NO: 11693 - DNA, 33 bp, homo sapiens
ctttctagaagctctayggaaggccaacaggga

SEQ ID NO: 11694 - DNA, 33 bp, homo sapiens
cagtaggagtgatgtayggggcacctacttggg

SEQ ID NO: 11695 - DNA, 33 bp, homo sapiens
gctgttcaaagcccacracgatactttgtactt

SEQ ID NO: 11696 - DNA, 33 bp, homo sapiens
tgcaaggaagaggtaayggtgctctaggacaag

SEQ ID NO: 11697 - DNA, 33 bp, homo sapiens
atcctcagagggaaagrccagtgaatgccagat

SEQ ID NO: 11698 - DNA, 33 bp, homo sapiens
acttggcatcagtcagyatccccctttatcctt

SEQ ID NO: 11699 - DNA, 33 bp, homo sapiens
atccagaaccttgactsaactgtgccaccccac

SEQ ID NO: 11700 - DNA, 33 bp, homo sapiens
gtatcgatgctgcaaaraagtcccaacacaata

SEQ ID NO: 11701 - DNA, 33 bp, homo sapiens
ggaaatccaagaccaakgtgccagaaaattgga

SEQ ID NO: 11702 - DNA, 33 bp, homo sapiens
cagacgatcatgaatcmaaatttgagaaacctt

SEQ ID NO: 11703 - DNA, 33 bp, homo sapiens
atgtagacactaagacrgatcaaattcagatat

SEQ ID NO: 11704 - DNA, 33 bp, homo sapiens
aatcaagttgttaaggrccagtgcagagacctc

SEQ ID NO: 11705 - DNA, 33 bp, homo sapiens
gactgttgaaaagatgscaaaagattctgactt

SEQ ID NO: 11706 - DNA, 33 bp, homo sapiens
ttggtgcctttctgagyagaaataagttgtaaa

SEQ ID NO: 11707 - DNA, 33 bp, homo sapiens
ttaacacccacacctcyagtgcctagtcatggc

SEQ ID NO: 11708 - DNA, 33 bp, homo sapiens
acatacaactttgcaaygagcaactttgtgcat

SEQ ID NO: 11709 - DNA, 33 bp, homo sapiens
gataaaagctaggacartgtaggaaacttttta

SEQ ID NO: 11710 - DNA, 33 bp, homo sapiens
caatacacatttattargcatctactttcgcca

SEQ ID NO: 11711 - DNA, 33 bp, homo sapiens
aaatggttttcttttcyctagcatcctctcaat

SEQ ID NO: 11712 - DNA, 33 bp, homo sapiens
gctgagcggggtgacayatcgcaggggtgctta

SEQ ID NO: 11713 - DNA, 33 bp, homo sapiens
accaaatcatagttcartaccctgctatatatt

SEQ ID NO: 11714 - DNA, 33 bp, homo sapiens
taaagctgtaagaagcrctgatttattggcttt

SEQ ID NO: 11715 - DNA, 33 bp, homo sapiens
taagccagcttttatcscatgatgcttatatgt

SEQ ID NO: 11716 - DNA, 33 bp, homo sapiens
aaggtcaaattggggamaagatgaaacatatgt

SEQ ID NO: 11717 - DNA, 33 bp, homo sapiens
tatccttttaagtctaycttacattctaccttt

SEQ ID NO: 11718 - DNA, 33 bp, homo sapiens
gactgattgtccagatsaaacagcacaactgaa

SEQ ID NO: 11719 - DNA, 33 bp, homo sapiens
cttcaaaccctatgcaraagtttttttcttttt

SEQ ID NO: 11720 - DNA, 33 bp, homo sapiens
gactgcccaaaggtgastagcctaggttgacaa

SEQ ID NO: 11721 - DNA, 33 bp, homo sapiens
gttcaacaccagtgggwcaacatagtaagaccc

SEQ ID NO: 11722 - DNA, 33 bp, homo sapiens
gtgctaatgcaatcaayggtaccaaaaatgaag

SEQ ID NO: 11723 - DNA, 33 bp, homo sapiens
tggcaggagggcttccratgagttagttctgag

SEQ ID NO: 11724 - DNA, 33 bp, homo sapiens
aatcactaggtaaagcrgaaagattaatgacca

SEQ ID NO: 11725 - DNA, 33 bp, homo sapiens
gagaagtggtttcttayggaaagctatggtcct

SEQ ID NO: 11726 - DNA, 33 bp, homo sapiens
gtgaatataccgatcaycaacatcatctagctc

SEQ ID NO: 11727 - DNA, 33 bp, homo sapiens
tgcttagatcactagartcagttactcttccaa

SEQ ID NO: 11728 - DNA, 33 bp, homo sapiens
aagagtcaagctttcartcatgtcctgcaatgg

SEQ ID NO: 11729 - DNA, 33 bp, homo sapiens
gatggttttgtgggtakctgaagttctatatcc

SEQ ID NO: 11730 - DNA, 33 bp, homo sapiens
aattcactgttctggartagtctaccataccat

SEQ ID NO: 11731 - DNA, 33 bp, homo sapiens
gcttactgcctggcaaycaaagtcactacctgt

SEQ ID NO: 11732 - DNA, 33 bp, homo sapiens
ctgccaccaaagagaargctgactctcccgcaa

SEQ ID NO: 11733 - DNA, 33 bp, homo sapiens
caaaaacatctatccasgccaacgttgcttctg

SEQ ID NO: 11734 - DNA, 33 bp, homo sapiens
ctcctgttttctttagscgtcaaactctgcccc

SEQ ID NO: 11735 - DNA, 33 bp, homo sapiens
agaatttggtattttcwatgttctggatttcgg

SEQ ID NO: 11736 - DNA, 33 bp, homo sapiens
agcctttcctcattccycattcctgaactagaa

SEQ ID NO: 11737 - DNA, 33 bp, homo sapiens
tatgttttgttggtagmattattaggatctagt

SEQ ID NO: 11738 - DNA, 33 bp, homo sapiens
ccagtgggtgtattaayaattaggttggcttgc

SEQ ID NO: 11739 - DNA, 33 bp, homo sapiens
gcagtgtgattgaaaaygatgtttgtcacttcc

SEQ ID NO: 11740 - DNA, 33 bp, homo sapiens
aacagaaatggcaaaargtctgctattattttc

SEQ ID NO: 11741 - DNA, 33 bp, homo sapiens
ctttcaagaatgaatcrattttgtatgttatgt

SEQ ID NO: 11742 - DNA, 33 bp, homo sapiens
taatacaagcagcagcmagaatttcaagtgcat

SEQ ID NO: 11743 - DNA, 33 bp, homo sapiens
agctgtgagacctgggrcaagtgatttgacatc

SEQ ID NO: 11744 - DNA, 33 bp, homo sapiens
actagacaccgagttaygaaacttagagcaaaa

SEQ ID NO: 11745 - DNA, 33 bp, homo sapiens
cagccactgggcttgcraggagccttctagagc

SEQ ID NO: 11746 - DNA, 33 bp, homo sapiens
caaatgctgcttcagcraaatgtaactaaaggg

SEQ ID NO: 11747 - DNA, 33 bp, homo sapiens
tagtgaggtctcaacaytgaaaatagtcaagaa

SEQ ID NO: 11748 - DNA, 33 bp, homo sapiens
cataggaagttcccatraatgtttgtgggataa

SEQ ID NO: 11749 - DNA, 33 bp, homo sapiens
cttgcttctgtctgagraaacaggaaagaaaat

SEQ ID NO: 11750 - DNA, 33 bp, homo sapiens
atttaaagtgtaaggayagacacaaatagagca

SEQ ID NO: 11751 - DNA, 33 bp, homo sapiens
ttttgtgatttttcctyagaatgtgtggtaaaa

SEQ ID NO: 11752 - DNA, 33 bp, homo sapiens
agcagggatctgacatrataaaagtggtcttct

SEQ ID NO: 11753 - DNA, 33 bp, homo sapiens
gaattccaggcactaakgagctgactcaacact

SEQ ID NO: 11754 - DNA, 33 bp, homo sapiens
tggccccagctagcaasaggttcattctcaatc

SEQ ID NO: 11755 - DNA, 33 bp, homo sapiens
gctttgagaagaaaaargattcacccaatgagc

SEQ ID NO: 11756 - DNA, 33 bp, homo sapiens
tgagtaaaaaatacaamaggcaaaagatgaaaa

SEQ ID NO: 11757 - DNA, 33 bp, homo sapiens
attccttgaaaatcacraacttctaaaactaac

SEQ ID NO: 11758 - DNA, 33 bp, homo sapiens
gagctcagagaaagcargtagggatgggaagca

SEQ ID NO: 11759 - DNA, 33 bp, homo sapiens
aatttgatagttcaatkagttagaggaaaatgt

SEQ ID NO: 11760 - DNA, 33 bp, homo sapiens
cttctggcactaccccrcactgtccgctaccat

SEQ ID NO: 11761 - DNA, 33 bp, homo sapiens
cacagagtgcctcaaaraacaagcctactgtcc

SEQ ID NO: 11762 - DNA, 33 bp, homo sapiens
actgttcatcagcttcragtaacaaacatacca

SEQ ID NO: 11763 - DNA, 33 bp, homo sapiens
actggagtgatatgtgsagtccttttaaagggg

SEQ ID NO: 11764 - DNA, 33 bp, homo sapiens
gaacagagatggagtasatttatatgggaaaat

SEQ ID NO: 11765 - DNA, 33 bp, homo sapiens
cagctgaagcagcaagrctaacccgtaagagct

SEQ ID NO: 11766 - DNA, 33 bp, homo sapiens
catgaacttagcaaacwgctacaagcttaactg

SEQ ID NO: 11767 - DNA, 33 bp, homo sapiens
cctccactttgaatccrccaggcccactctaat

SEQ ID NO: 11768 - DNA, 33 bp, homo sapiens
aatcagtgagccagtayattgaagttaggcaat

SEQ ID NO: 11769 - DNA, 33 bp, homo sapiens
aatagtggatatgaaartgctttacaagttaaa

SEQ ID NO: 11770 - DNA, 33 bp, homo sapiens
agtacaaaggaatctcrctcctagaatgcttag

SEQ ID NO: 11771 - DNA, 33 bp, homo sapiens
cagcgtcttgcacagayacttgtacaccatgtt

SEQ ID NO: 11772 - DNA, 33 bp, homo sapiens
acataaatactgggaaycagtgaataacatcta

SEQ ID NO: 11773 - DNA, 33 bp, homo sapiens
ctcagcggacaaaagasaaagctcattgattgt

SEQ ID NO: 11774 - DNA, 33 bp, homo sapiens
tatagcttatttcttaygcaggtgggtaagctc

SEQ ID NO: 11775 - DNA, 33 bp, homo sapiens
gctgcagcttgggaatracatccagagcttacc

SEQ ID NO: 11776 - DNA, 33 bp, homo sapiens
acagtgaggaggcacasaatttccacactgaaa

SEQ ID NO: 11777 - DNA, 33 bp, homo sapiens
gggaacgcttcttgacmgggtaaagagtcattc

SEQ ID NO: 11778 - DNA, 33 bp, homo sapiens
gtagtggttgaagtacycatattagaaacatct

SEQ ID NO: 11779 - DNA, 33 bp, homo sapiens
gactggggaaaaagacraggtcatggcctaggt

SEQ ID NO: 11780 - DNA, 33 bp, homo sapiens
atatgaaatatcgtgayggacaacctaagtctt

SEQ ID NO: 11781 - DNA, 33 bp, homo sapiens
taatataattagtgtamctgcttaaaactgtat

SEQ ID NO: 11782 - DNA, 33 bp, homo sapiens
ttgtcagatctcaaaarcaagattggaaatcat

SEQ ID NO: 11783 - DNA, 33 bp, homo sapiens
cactattacacttcctracaaacctttcatgtg

SEQ ID NO: 11784 - DNA, 33 bp, homo sapiens
tctaggttcactgtaayaagagtcagtatggaa

SEQ ID NO: 11785 - DNA, 33 bp, homo sapiens
tttgaccagttccaaakataggcaaggatctag

SEQ ID NO: 11786 - DNA, 33 bp, homo sapiens
ttggtaaaaaaggaaamtctcattggctcacct

SEQ ID NO: 11787 - DNA, 33 bp, homo sapiens
aaaacaaatgaactcayggaaatagaaagtgga

SEQ ID NO: 11788 - DNA, 33 bp, homo sapiens
aggcagactatctgatyaaccaggaactggtct

SEQ ID NO: 11789 - DNA, 33 bp, homo sapiens
ctcaacatcccccttcyacatttcctcccacat

SEQ ID NO: 11790 - DNA, 33 bp, homo sapiens
tatctagtgatcttagmaaactggtgacttttt

SEQ ID NO: 11791 - DNA, 33 bp, homo sapiens
cctcatgagaaatcagwatgtgcagaacacaag

SEQ ID NO: 11792 - DNA, 33 bp, homo sapiens
aagactctgagcccccracattggctcttagct

SEQ ID NO: 11793 - DNA, 33 bp, homo sapiens
gctttgtcttctgtccsacttgcctcaggatgt

SEQ ID NO: 11794 - DNA, 33 bp, homo sapiens
gtcacaccttgcctaawctggtagccaccatgc

SEQ ID NO: 11795 - DNA, 33 bp, homo sapiens
acgctccgcttccggaygccaacgccacaactg

SEQ ID NO: 11796 - DNA, 33 bp, homo sapiens
ggctccaaactcctgayggcgaagaggaatgca

SEQ ID NO: 11797 - DNA, 33 bp, homo sapiens
gccacttgaattgttayatgagagaaggtgatg

SEQ ID NO: 11798 - DNA, 33 bp, homo sapiens
tgaaaatttctgataayagatttggttgttctc

SEQ ID NO: 11799 - DNA, 33 bp, homo sapiens
tcttcatttcctaagaracacccattagcattg

SEQ ID NO: 11800 - DNA, 33 bp, homo sapiens
gacaatcccaccatccyatagcatgttacttta

SEQ ID NO: 11801 - DNA, 33 bp, homo sapiens
ctactgaatgatcttaracaagttacagcaggt

SEQ ID NO: 11802 - DNA, 33 bp, homo sapiens
gaggacttgctgtaaayttctcttcagttgcct

SEQ ID NO: 11803 - DNA, 33 bp, homo sapiens
aatggagtagctatacrctggccacaatataga

SEQ ID NO: 11804 - DNA, 33 bp, homo sapiens
gttttcctgttgacacrcttctctgttccttgg

SEQ ID NO: 11805 - DNA, 33 bp, homo sapiens
tccactccttctgtaasggggagttttcttcct

SEQ ID NO: 11806 - DNA, 33 bp, homo sapiens
ccaagctagtggtcaaraaaaagaaacaataga

SEQ ID NO: 11807 - DNA, 33 bp, homo sapiens
tttctcagctggaccaygatcctatttttatgt

SEQ ID NO: 11808 - DNA, 33 bp, homo sapiens
ttttatcctctccgaamctatcccttcatctgt

SEQ ID NO: 11809 - DNA, 33 bp, homo sapiens
gttgttaaaggggaaargagggagccagatttc

SEQ ID NO: 11810 - DNA, 33 bp, homo sapiens
gctccaaaaagactgaragcatctgaagagaac

SEQ ID NO: 11811 - DNA, 33 bp, homo sapiens
agtaacaacaaggataragagtctgaacttccc

SEQ ID NO: 11812 - DNA, 33 bp, homo sapiens
tggccctgtgcagagaygacactccagtggttc

SEQ ID NO: 11813 - DNA, 33 bp, homo sapiens
agtcctctcctgcaccyctttcatgtttcagcc

SEQ ID NO: 11814 - DNA, 33 bp, homo sapiens
tgttccccaacacctaycggccatcatcgagtc

SEQ ID NO: 11815 - DNA, 33 bp, homo sapiens
caactatacatccaaasaaacaatagctacata

SEQ ID NO: 11816 - DNA, 33 bp, homo sapiens
aatccaataccaccacmcagaggtaacatcttg

SEQ ID NO: 11817 - DNA, 33 bp, homo sapiens
aggaagtaacagatccygaaggctctaacagaa

SEQ ID NO: 11818 - DNA, 33 bp, homo sapiens
gcatgggtttgtgcacrgggacgctacttgact

SEQ ID NO: 11819 - DNA, 33 bp, homo sapiens
tgttaactattatatakctacaaaataccttca

SEQ ID NO: 11820 - DNA, 33 bp, homo sapiens
atctctcagatttacayctcacatacttgctaa

SEQ ID NO: 11821 - DNA, 33 bp, homo sapiens
aatagctgcaagtttcragttagattcattaac

SEQ ID NO: 11822 - DNA, 33 bp, homo sapiens
agacaaactctttagargaaaatctatatgtac

SEQ ID NO: 11823 - DNA, 33 bp, homo sapiens
gtgttaaaaatcagacmggctgtgaaaatacaa

SEQ ID NO: 11824 - DNA, 33 bp, homo sapiens
tgcaatgaggatggaargcaaatatcattttaa

SEQ ID NO: 11825 - DNA, 33 bp, homo sapiens
ttttctgaaatgccagraattgggatatggaaa

SEQ ID NO: 11826 - DNA, 33 bp, homo sapiens
ggtacttgcctttctcraaaactgatagtaaac

SEQ ID NO: 11827 - DNA, 33 bp, homo sapiens
aaccctgagttcttaaytgctacacttcggtgt

SEQ ID NO: 11828 - DNA, 33 bp, homo sapiens
tgttatgagacttgaayagcgtaaacctgaatg

SEQ ID NO: 11829 - DNA, 33 bp, homo sapiens
tacattaacacaaagcygaaacgggtaaccaaa

SEQ ID NO: 11830 - DNA, 33 bp, homo sapiens
tttgtactgttttcaawccttaaagcctctgtt

SEQ ID NO: 11831 - DNA, 33 bp, homo sapiens
ttggagtgatgtagtgmaaacttccactactgt

SEQ ID NO: 11832 - DNA, 33 bp, homo sapiens
ttcaagataatgttccraaagaggattcattta

SEQ ID NO: 11833 - DNA, 33 bp, homo sapiens
ttctgttatgagattaygtgatatattgtccac

SEQ ID NO: 11834 - DNA, 33 bp, homo sapiens
tcccaggagcttggcayaggtgagaaaagaatc

SEQ ID NO: 11835 - DNA, 33 bp, homo sapiens
gcatggcgaaaaaaackgaattaggagtgcatg

SEQ ID NO: 11836 - DNA, 33 bp, homo sapiens
ttcctactgccaccaamaaacattgcccatata

SEQ ID NO: 11837 - DNA, 33 bp, homo sapiens
cagaaagggaccagagrcgtgaggctacacttt

SEQ ID NO: 11838 - DNA, 33 bp, homo sapiens
ctccaattacaattaasgttttttggctttatt

SEQ ID NO: 11839 - DNA, 33 bp, homo sapiens
catataggagatatcakaatcaccttcttggga

SEQ ID NO: 11840 - DNA, 33 bp, homo sapiens
tttttgttgatgccacyattattaccctcctaa

SEQ ID NO: 11841 - DNA, 33 bp, homo sapiens
tcagagttaaggtgcamaagctcaaccatcatg

SEQ ID NO: 11842 - DNA, 33 bp, homo sapiens
ctttcaaaaaatgagawccacttatgagatctt

SEQ ID NO: 11843 - DNA, 33 bp, homo sapiens
ttcgaaaactttgcaamctctaaaacgtgagga

SEQ ID NO: 11844 - DNA, 33 bp, homo sapiens
taaatatatacacccayctggccctttcactat

SEQ ID NO: 11845 - DNA, 33 bp, homo sapiens
taaatgttcactgaatsaatatataaagagaaa

SEQ ID NO: 11846 - DNA, 33 bp, homo sapiens
gtgttatctcttgttaygtttcatatacgtttt

SEQ ID NO: 11847 - DNA, 33 bp, homo sapiens
cttatgatccaaattargttttgagttgacttt

SEQ ID NO: 11848 - DNA, 33 bp, homo sapiens
aagatatttcagctatraagatgaggtatcgtc

SEQ ID NO: 11849 - DNA, 33 bp, homo sapiens
gaaatggtatatgaaarccagaaataaaggtaa

SEQ ID NO: 11850 - DNA, 33 bp, homo sapiens
tgagcagcaatcttcayattagctctacaatga

SEQ ID NO: 11851 - DNA, 33 bp, homo sapiens
ggttttaaatccctagraccagctcaaatattg

SEQ ID NO: 11852 - DNA, 33 bp, homo sapiens
agagcaggtgctctccraatacttacaagtgct

SEQ ID NO: 11853 - DNA, 33 bp, homo sapiens
caaatgaaactcgagamagcctgctgaaggctt

SEQ ID NO: 11854 - DNA, 33 bp, homo sapiens
caattcagaaaatgacrgacatggctaaagagt

SEQ ID NO: 11855 - DNA, 33 bp, homo sapiens
aatgtgtagtacatcaytacagggcttacccat

SEQ ID NO: 11856 - DNA, 33 bp, homo sapiens
atcttcttgaaattaaragacatgcatgtaaat

SEQ ID NO: 11857 - DNA, 33 bp, homo sapiens
aataaaagcatgaatgmacttgtattcccatgt

SEQ ID NO: 11858 - DNA, 33 bp, homo sapiens
attgatgtgattaacarggaagttgggttaatt

SEQ ID NO: 11859 - DNA, 33 bp, homo sapiens
ccctatcagagagcacygtctatttcctgcatt

SEQ ID NO: 11860 - DNA, 33 bp, homo sapiens
tacacactggtaacaayatccaagatcatttga

SEQ ID NO: 11861 - DNA, 33 bp, homo sapiens
tagactcaaaaatggaractatcatattcattt

SEQ ID NO: 11862 - DNA, 33 bp, homo sapiens
acctagttactagtgamcgagtattattcagaa

SEQ ID NO: 11863 - DNA, 33 bp, homo sapiens
tatactcgtaacaccaktagatagctcactttt

SEQ ID NO: 11864 - DNA, 33 bp, homo sapiens
ctaacagaaaagagacragtctacgttaccata

SEQ ID NO: 11865 - DNA, 33 bp, homo sapiens
ttgttttaaaactccastgagcacatgggctac

SEQ ID NO: 11866 - DNA, 33 bp, homo sapiens
gccagtgggtatcctaygagtaaatatccccag

SEQ ID NO: 11867 - DNA, 33 bp, homo sapiens
ctttcttatgactccgrcattctactattaggt

SEQ ID NO: 11868 - DNA, 33 bp, homo sapiens
aaggacatccttaagargtataaaagatgagct

SEQ ID NO: 11869 - DNA, 33 bp, homo sapiens
atgacagggatcttcaraaaagaagaaacatca

SEQ ID NO: 11870 - DNA, 33 bp, homo sapiens
aggaacataaacagcckgcattagggaaattta

SEQ ID NO: 11871 - DNA, 33 bp, homo sapiens
cataatgcatttcctayagtttatctgaatgat

SEQ ID NO: 11872 - DNA, 33 bp, homo sapiens
aagtatgtgaagacgayaggtgcctgcgttatt

SEQ ID NO: 11873 - DNA, 33 bp, homo sapiens
ttccagtggttttaacwgaatccatttatttca

SEQ ID NO: 11874 - DNA, 33 bp, homo sapiens
tacactctattcttcartaagaccaaatgactc

SEQ ID NO: 11875 - DNA, 33 bp, homo sapiens
agactaggaattaatgracgcagacatcatagg

SEQ ID NO: 11876 - DNA, 33 bp, homo sapiens
tgaagggcaaacaccaytgagttaatcagagaa

SEQ ID NO: 11877 - DNA, 33 bp, homo sapiens
tttcgaagccttcagaraaatgcattgcattgt

SEQ ID NO: 11878 - DNA, 33 bp, homo sapiens
gtaggtttcctatcaaygaatggagtggaggga

SEQ ID NO: 11879 - DNA, 33 bp, homo sapiens
ccaagtttcctttcacyggcatcgaccctggaa

SEQ ID NO: 11880 - DNA, 33 bp, homo sapiens
tcctagctgactgtcarataaacagagttttgt

SEQ ID NO: 11881 - DNA, 33 bp, homo sapiens
taaattagaatcgccargtaaatctgttgatca

SEQ ID NO: 11882 - DNA, 33 bp, homo sapiens
catgtatattgctcccmatcttttttcatgtat

SEQ ID NO: 11883 - DNA, 33 bp, homo sapiens
ccgacggccatcctcartgaccatatgccctgc

SEQ ID NO: 11884 - DNA, 33 bp, homo sapiens
atgaatgagttgggagkctccatagatgtcaga

SEQ ID NO: 11885 - DNA, 33 bp, homo sapiens
ttcttttgcactaggckagcacattttaagcct

SEQ ID NO: 11886 - DNA, 33 bp, homo sapiens
cccccacacctctacayggtagcttagtccact

SEQ ID NO: 11887 - DNA, 33 bp, homo sapiens
gattcatctcctagaarccttccaggatgccct

SEQ ID NO: 11888 - DNA, 33 bp, homo sapiens
gtgtgaggcactcttcyaaccatgtttatgtac

SEQ ID NO: 11889 - DNA, 33 bp, homo sapiens
agactgaatgtttgagwcccctgcaaattcaca

SEQ ID NO: 11890 - DNA, 33 bp, homo sapiens
tgagccaacctattccraatccacctattaccc

SEQ ID NO: 11891 - DNA, 33 bp, homo sapiens
cacataatgggtgttayataaatgattcaatag

SEQ ID NO: 11892 - DNA, 33 bp, homo sapiens
tgactggccggctatakatcagagctttccagg

SEQ ID NO: 11893 - DNA, 33 bp, homo sapiens
tctgttaccgacccacygtatacgccatttggg

SEQ ID NO: 11894 - DNA, 33 bp, homo sapiens
agacttcaggaacatcrattccaggagctggga

SEQ ID NO: 11895 - DNA, 33 bp, homo sapiens
tgggggaaattttgtasagaggcttgacaagga

SEQ ID NO: 11896 - DNA, 33 bp, homo sapiens
gactggagccatctcaragtcctcctcactcat

SEQ ID NO: 11897 - DNA, 33 bp, homo sapiens
acacagttccaggtgayctcacgggcctactat

SEQ ID NO: 11898 - DNA, 33 bp, homo sapiens
atgaacctgcaaattarggaatactcatcaaag

SEQ ID NO: 11899 - DNA, 33 bp, homo sapiens
gctgctcttaaaaatcrcatctcacattgagac

SEQ ID NO: 11900 - DNA, 33 bp, homo sapiens
ctcggatttatggagargatcaagttgctcctg

SEQ ID NO: 11901 - DNA, 33 bp, homo sapiens
tagtgttgttagaactraagacggtgctaaaat

SEQ ID NO: 11902 - DNA, 33 bp, homo sapiens
ggatgaactgatgggayaaataaaagccacaag

SEQ ID NO: 11903 - DNA, 33 bp, homo sapiens
ttatttgtgcagtgaayaatacaaatgtggcta

SEQ ID NO: 11904 - DNA, 33 bp, homo sapiens
gttgaggtcaaagagcygactggagtggactga

SEQ ID NO: 11905 - DNA, 33 bp, homo sapiens
cacccatcagtccagayaaaatcactgctggag

SEQ ID NO: 11906 - DNA, 33 bp, homo sapiens
ggtagtttggtcatccrcgccacattccaagtg

SEQ ID NO: 11907 - DNA, 33 bp, homo sapiens
agctaatatataaaaaygcagttagcaccatgc

SEQ ID NO: 11908 - DNA, 33 bp, homo sapiens
tttaatcctatctccaytcaaccagtccagaga

SEQ ID NO: 11909 - DNA, 33 bp, homo sapiens
ttttgtactcctggaarcctggatataaatcct

SEQ ID NO: 11910 - DNA, 33 bp, homo sapiens
agcaatggaaaaccacygatagacagatagact

SEQ ID NO: 11911 - DNA, 33 bp, homo sapiens
agtggagggctctggcygatcaatgccttctct

SEQ ID NO: 11912 - DNA, 33 bp, homo sapiens
agccccttcttgggaaytaggctctctggatag

SEQ ID NO: 11913 - DNA, 33 bp, homo sapiens
tttgaaagtttgcctcracaagcagcaggactg

SEQ ID NO: 11914 - DNA, 33 bp, homo sapiens
cccggactgtaacacckggtctaatgccttcat

SEQ ID NO: 11915 - DNA, 33 bp, homo sapiens
agaaaatctgtactcaraaccccaatacccaca

SEQ ID NO: 11916 - DNA, 33 bp, homo sapiens
ttgctcaacagggaaastgtaaaactgaaatgg

SEQ ID NO: 11917 - DNA, 33 bp, homo sapiens
ctccattagatctgaaygtagtttctcgaggtt

SEQ ID NO: 11918 - DNA, 33 bp, homo sapiens
tgtgttgtactatgtamctggcatatagtaacc

SEQ ID NO: 11919 - DNA, 33 bp, homo sapiens
caattcctgacccttaygtagctctgatccttc

SEQ ID NO: 11920 - DNA, 33 bp, homo sapiens
catagatacaaagagarcaaagtgtgtttatga

SEQ ID NO: 11921 - DNA, 33 bp, homo sapiens
ttgggccaactaaaggyagacaagaaacaatac

SEQ ID NO: 11922 - DNA, 33 bp, homo sapiens
acagcatccacttgcaytgagtccagcttggta

SEQ ID NO: 11923 - DNA, 33 bp, homo sapiens
gggagaggcaggcaaaygtgctcttcccaaatg

SEQ ID NO: 11924 - DNA, 33 bp, homo sapiens
tttctctagcttagagraaactcatctaggaag

SEQ ID NO: 11925 - DNA, 33 bp, homo sapiens
accagcatcatatgaaygaacccacttggtcct

SEQ ID NO: 11926 - DNA, 33 bp, homo sapiens
gaaatacacccgaacayatatagtcaactaatt

SEQ ID NO: 11927 - DNA, 33 bp, homo sapiens
tgaatgaaaaacgaaaygaacaaattgcagaaa

SEQ ID NO: 11928 - DNA, 33 bp, homo sapiens
actgattgcatttctaygatgagtccctactgt

SEQ ID NO: 11929 - DNA, 33 bp, homo sapiens
aagctccgaagaacagyagtctacgaaaaacaa

SEQ ID NO: 11930 - DNA, 33 bp, homo sapiens
tgttcacctgtgtacartcatataccgtttgtc

SEQ ID NO: 11931 - DNA, 33 bp, homo sapiens
ccctcaattttgcagamtatcgaattacctaaa

SEQ ID NO: 11932 - DNA, 33 bp, homo sapiens
gtgaaattgtagcccaygtacagctcagcaaat

SEQ ID NO: 11933 - DNA, 33 bp, homo sapiens
agagaactcaaaaatartaaggtatcaagaagt

SEQ ID NO: 11934 - DNA, 33 bp, homo sapiens
actattttaagaagaaktggtattggttttctg

SEQ ID NO: 11935 - DNA, 33 bp, homo sapiens
aattaaaaggaggaacmacattgatggaggaga

SEQ ID NO: 11936 - DNA, 33 bp, homo sapiens
gattgcttaggtatacragtgaaaatgcctccc

SEQ ID NO: 11937 - DNA, 33 bp, homo sapiens
aagaacatgctgaaaartaccaccaatatagag

SEQ ID NO: 11938 - DNA, 33 bp, homo sapiens
ttaatttaagtatcaarctcgttcaattattct

SEQ ID NO: 11939 - DNA, 33 bp, homo sapiens
aggagtggcatgatgayaaagatattgcccaaa

SEQ ID NO: 11940 - DNA, 33 bp, homo sapiens
ggtcttcctaccaataygcctttagcatcccag

SEQ ID NO: 11941 - DNA, 33 bp, homo sapiens
aaccctccagacgaagrcagagactctcactgg

SEQ ID NO: 11942 - DNA, 33 bp, homo sapiens
gaagaacaaagcggcaraaaaaatcagctcagg

SEQ ID NO: 11943 - DNA, 33 bp, homo sapiens
cttgccttctctccaayggggaattacctacca

SEQ ID NO: 11944 - DNA, 33 bp, homo sapiens
ccacagtcacctccccrccttccgacagtgtat

SEQ ID NO: 11945 - DNA, 33 bp, homo sapiens
tcagccttctctctcayaacagcctgggatggg

SEQ ID NO: 11946 - DNA, 33 bp, homo sapiens
ggttctcacctccataygtggaagtgacaggtt

SEQ ID NO: 11947 - DNA, 33 bp, homo sapiens
cacatagtcctaccacygaactgggtttgccag

SEQ ID NO: 11948 - DNA, 33 bp, homo sapiens
caggacatgtgggtgargatattaaggggcaaa

SEQ ID NO: 11949 - DNA, 33 bp, homo sapiens
tcccttgttttgatacygcactagagttagcac

SEQ ID NO: 11950 - DNA, 33 bp, homo sapiens
cacgtgtgtgtgagaaygtatgggggtatacca

SEQ ID NO: 11951 - DNA, 33 bp, homo sapiens
ccaggcaacaagaagcrcatctatttgtgcaaa

SEQ ID NO: 11952 - DNA, 33 bp, homo sapiens
atacgcaacttagcacygcgtcgccatgcactc

SEQ ID NO: 11953 - DNA, 33 bp, homo sapiens
acacccaaatccttgcrgactcaatcccacagt

SEQ ID NO: 11954 - DNA, 33 bp, homo sapiens
agttccatagtccagarggtacaaaatccttgg

SEQ ID NO: 11955 - DNA, 33 bp, homo sapiens
gtctgaacaacagtcayatagctatctctgcag

SEQ ID NO: 11956 - DNA, 33 bp, homo sapiens
tctcttgcttaaaaagmcttttcaaatgaatgt

SEQ ID NO: 11957 - DNA, 33 bp, homo sapiens
gtcaactccaaagaccrggaatatttgctcctt

SEQ ID NO: 11958 - DNA, 33 bp, homo sapiens
gcactgttagtagctawggaaattgatccattg

SEQ ID NO: 11959 - DNA, 33 bp, homo sapiens
aataaacaggagcagaygataatcttttctggg

SEQ ID NO: 11960 - DNA, 33 bp, homo sapiens
aagtcagcgatgtttcmagtgttaatagccatc

SEQ ID NO: 11961 - DNA, 33 bp, homo sapiens
ctccttagtctccaggsagcagttggagtgata

SEQ ID NO: 11962 - DNA, 33 bp, homo sapiens
caacacacagattaaamgaaataaccatacctt

SEQ ID NO: 11963 - DNA, 33 bp, homo sapiens
ttttgacatctataaaycttcaggcagccagac

SEQ ID NO: 11964 - DNA, 33 bp, homo sapiens
taagagagagacctaayagccatatgatgtttt

SEQ ID NO: 11965 - DNA, 33 bp, homo sapiens
tggtctggcatgaagakaattgtagagagcacc

SEQ ID NO: 11966 - DNA, 33 bp, homo sapiens
aaaggacacacatccarattttatcattccacc

SEQ ID NO: 11967 - DNA, 33 bp, homo sapiens
agaaacgggaacaagascatctaagcacccgag

SEQ ID NO: 11968 - DNA, 33 bp, homo sapiens
tcatctgtcagcctaasaaatcaaaacaagtta

SEQ ID NO: 11969 - DNA, 33 bp, homo sapiens
cttcatcttgccttcarcctccaagttgtcctt

SEQ ID NO: 11970 - DNA, 33 bp, homo sapiens
tggaattcatgtcttcygaaaaggttagtggga

SEQ ID NO: 11971 - DNA, 33 bp, homo sapiens
gaccaccatgtggtagycctcataactcatgtc

SEQ ID NO: 11972 - DNA, 33 bp, homo sapiens
tactttctggcactacraggtacttaagcttaa

SEQ ID NO: 11973 - DNA, 33 bp, homo sapiens
aatagaaaataaatagsaagactgcagatataa

SEQ ID NO: 11974 - DNA, 33 bp, homo sapiens
attaagtgaaagaagcrcaaatctgtctaacac

SEQ ID NO: 11975 - DNA, 33 bp, homo sapiens
ggtgctgtccagagtcmcttcaatgacaaactc

SEQ ID NO: 11976 - DNA, 33 bp, homo sapiens
ataacaggctaactaaygtcacaaaggtcattt

SEQ ID NO: 11977 - DNA, 33 bp, homo sapiens
gcctgtgtattgcttcrccccaagacacatgtg

SEQ ID NO: 11978 - DNA, 33 bp, homo sapiens
aataaccttgaggaacwgggaagattcatggca

SEQ ID NO: 11979 - DNA, 33 bp, homo sapiens
gtatgttgctggagacsagagattaaatgcagg

SEQ ID NO: 11980 - DNA, 33 bp, homo sapiens
ttaaaaagccactttayagaagtatgactgata

SEQ ID NO: 11981 - DNA, 33 bp, homo sapiens
tgatgccatgtttttaragatatttcaagcatt

SEQ ID NO: 11982 - DNA, 33 bp, homo sapiens
gtaagacaacgtaggcraaacaaaggtactatg

SEQ ID NO: 11983 - DNA, 33 bp, homo sapiens
atccaatgtatcagaayggaattgtaattaaag

SEQ ID NO: 11984 - DNA, 33 bp, homo sapiens
gtatccttccatgttcrcctgtagtttctgaac

SEQ ID NO: 11985 - DNA, 33 bp, homo sapiens
tagtgaaagaaaccaarcccaaatgactgtatg

SEQ ID NO: 11986 - DNA, 33 bp, homo sapiens
ctcaataggtgcgaaaraaacaggcaaaattca

SEQ ID NO: 11987 - DNA, 33 bp, homo sapiens
catttgagtgcatccaygttaactttgtcttgt

SEQ ID NO: 11988 - DNA, 33 bp, homo sapiens
gtgatgaaatgcagacmgctgaactgaaagttc

SEQ ID NO: 11989 - DNA, 33 bp, homo sapiens
taaactgtgcattgccraatatttctcaagtat

SEQ ID NO: 11990 - DNA, 33 bp, homo sapiens
acttaacaaacattgayctcctatgatgtacca

SEQ ID NO: 11991 - DNA, 33 bp, homo sapiens
agtatttaaactcctgsaactagttgagatcct

SEQ ID NO: 11992 - DNA, 33 bp, homo sapiens
cttcgatgtggggatgycaggtatgtcgctgag

SEQ ID NO: 11993 - DNA, 33 bp, homo sapiens
gagctggagccatggaracctatccaacaggag

SEQ ID NO: 11994 - DNA, 33 bp, homo sapiens
agctacattttcccctsaccacacagctccagc

SEQ ID NO: 11995 - DNA, 33 bp, homo sapiens
catgtatgtacaagaawcccaactatcttctaa

SEQ ID NO: 11996 - DNA, 33 bp, homo sapiens
cacacacgacgtttgcygacgcgccaatcagtg

SEQ ID NO: 11997 - DNA, 33 bp, homo sapiens
gtggcagacagaaaaawttaaaactaatgaatg

SEQ ID NO: 11998 - DNA, 33 bp, homo sapiens
aaaagcaaacttgatgragaatcgtgattgaag

SEQ ID NO: 11999 - DNA, 33 bp, homo sapiens
aaaaaaataaaattcayagcagcaaggtgatca

SEQ ID NO: 12000 - DNA, 33 bp, homo sapiens
aatacttggtaaaagascatttcacaagcaccc

SEQ ID NO: 12001 - DNA, 33 bp, homo sapiens
tctctgaatgacaaacrctctttaaattggaat

SEQ ID NO: 12002 - DNA, 33 bp, homo sapiens
tgcctatgattgatgarcacatgaaaagatgct

SEQ ID NO: 12003 - DNA, 33 bp, homo sapiens
aagaaagctggttgtayaataaatataggcata

SEQ ID NO: 12004 - DNA, 33 bp, homo sapiens
ctattagttgtgatcayggcattgtgactatat

SEQ ID NO: 12005 - DNA, 33 bp, homo sapiens
tgtcttttcttaatcaytcacatttaggtacca

SEQ ID NO: 12006 - DNA, 33 bp, homo sapiens
gaatgtgtcggcagcaytgactctaagacccga

SEQ ID NO: 12007 - DNA, 33 bp, homo sapiens
tggtgggaacactaaayactacagccactttgg

SEQ ID NO: 12008 - DNA, 33 bp, homo sapiens
ttatggtaatagggacmgggatgacatggatca

SEQ ID NO: 12009 - DNA, 33 bp, homo sapiens
tggagcttcgtgtagcrctgtttttggacaagt

SEQ ID NO: 12010 - DNA, 33 bp, homo sapiens
cgagagtcatttccccyacacctccggctcctc

SEQ ID NO: 12011 - DNA, 33 bp, homo sapiens
cgtcactggaaggggcsaggtaggatgctgttg

SEQ ID NO: 12012 - DNA, 33 bp, homo sapiens
tctccaaagatatttaygggttcagatacatca

SEQ ID NO: 12013 - DNA, 33 bp, homo sapiens
taggaaagctggagagsctacagtaatagacaa

SEQ ID NO: 12014 - DNA, 33 bp, homo sapiens
cttcccagatgcaggaygagaactcggacaaag

SEQ ID NO: 12015 - DNA, 33 bp, homo sapiens
cgtaacacagcataaartctaccaacagaatac

SEQ ID NO: 12016 - DNA, 33 bp, homo sapiens
aggactgtgtaatgatwaaattgattaacttca

SEQ ID NO: 12017 - DNA, 33 bp, homo sapiens
gttggtttgaaacttaycacttgtcatgggtgc

SEQ ID NO: 12018 - DNA, 33 bp, homo sapiens
gaggcccatgtgatgcrcgggttgaggctctga

SEQ ID NO: 12019 - DNA, 33 bp, homo sapiens
tatccctgaattaggaygtgtcacatgaacagg

SEQ ID NO: 12020 - DNA, 33 bp, homo sapiens
gtttatagcagcagtarcaaaaaggtgggagca

SEQ ID NO: 12021 - DNA, 33 bp, homo sapiens
ggccccctactagtcckaactcattttgagggt

SEQ ID NO: 12022 - DNA, 33 bp, homo sapiens
aatgggttctaagttayaaagtgagattatttc

SEQ ID NO: 12023 - DNA, 33 bp, homo sapiens
gtacctttttgctggaygcttcaaatcctttga

SEQ ID NO: 12024 - DNA, 33 bp, homo sapiens
gcacacgttagttacartgaattcaacattctt

SEQ ID NO: 12025 - DNA, 33 bp, homo sapiens
atgttttactggttcartgaaagtaacagcttg

SEQ ID NO: 12026 - DNA, 33 bp, homo sapiens
tactttctcttcttccrcagtcgtgtcaatacc

SEQ ID NO: 12027 - DNA, 33 bp, homo sapiens
atttgagaagcatgatraggtcctcctgcccca

SEQ ID NO: 12028 - DNA, 33 bp, homo sapiens
attcttaacttcctgayaatagagcaaatagtt

SEQ ID NO: 12029 - DNA, 33 bp, homo sapiens
gatggatgaataggaaygcaaaaaggtggcttt

SEQ ID NO: 12030 - DNA, 33 bp, homo sapiens
taaagggcatgtgaaaygtaggcagggaagtca

SEQ ID NO: 12031 - DNA, 33 bp, homo sapiens
tggcaaataccttcaaygtttatcctcctgcat

SEQ ID NO: 12032 - DNA, 33 bp, homo sapiens
gctgtcccaattaagaygcctgcaactgcagct

SEQ ID NO: 12033 - DNA, 33 bp, homo sapiens
gtgcaggtaatagatamggctgcacaagaaata

SEQ ID NO: 12034 - DNA, 33 bp, homo sapiens
gtagtgtacttccataygcttacttggctgact

SEQ ID NO: 12035 - DNA, 33 bp, homo sapiens
aaaaaatacagttaacwactccacgcataatta

SEQ ID NO: 12036 - DNA, 33 bp, homo sapiens
gcttatatctgtataartccctgggaatggaat

SEQ ID NO: 12037 - DNA, 33 bp, homo sapiens
atacgaatttccatacratgcatttttgtcaaa

SEQ ID NO: 12038 - DNA, 33 bp, homo sapiens
ttcattcaagtgtcacmagaaggaaaatttgtt

SEQ ID NO: 12039 - DNA, 33 bp, homo sapiens
ggactttcaatgcaggwcaatcactctgcagca

SEQ ID NO: 12040 - DNA, 33 bp, homo sapiens
gatcacctaagtataamaaattcattcagaatc

SEQ ID NO: 12041 - DNA, 33 bp, homo sapiens
ttattatggctaggtawagatttctagattgga

SEQ ID NO: 12042 - DNA, 33 bp, homo sapiens
taacttagtctgtggcrccattcttttcattga

SEQ ID NO: 12043 - DNA, 33 bp, homo sapiens
aggcttgcaggaattgragttcccatcagtggg

SEQ ID NO: 12044 - DNA, 33 bp, homo sapiens
atgcaagcctctaggayagtcaaaagtaatgta

SEQ ID NO: 12045 - DNA, 33 bp, homo sapiens
tgatggaactctattcyacaaggaatctcagat

SEQ ID NO: 12046 - DNA, 33 bp, homo sapiens
taattacttctccctcyaattgatacaactatt

SEQ ID NO: 12047 - DNA, 33 bp, homo sapiens
taaatatactttactakgtctgcggtggttcag

SEQ ID NO: 12048 - DNA, 33 bp, homo sapiens
ataaactcttagattasaaagtcttaaacttga

SEQ ID NO: 12049 - DNA, 33 bp, homo sapiens
gtccttaataggtcaawacttacagccagtatc

SEQ ID NO: 12050 - DNA, 33 bp, homo sapiens
ggatacaagtttattawgctaggagatgcaggg

SEQ ID NO: 12051 - DNA, 33 bp, homo sapiens
gtgaaacaactgacacygcggaagccaatggct

SEQ ID NO: 12052 - DNA, 33 bp, homo sapiens
aacatttggagaaagaraactatatatggcttc

SEQ ID NO: 12053 - DNA, 33 bp, homo sapiens
tctgtaggtaaacaaartccttctaccacacaa

SEQ ID NO: 12054 - DNA, 33 bp, homo sapiens
cttcaggggcaataacrcacatagagctgtcat

SEQ ID NO: 12055 - DNA, 33 bp, homo sapiens
atctgtgtgtcttacaytgatagccgaggttgt

SEQ ID NO: 12056 - DNA, 33 bp, homo sapiens
ttcttatatattggcayaggtatcactcacaac

SEQ ID NO: 12057 - DNA, 33 bp, homo sapiens
tgctttatgtgcactgyaggatatagcaaagtc

SEQ ID NO: 12058 - DNA, 33 bp, homo sapiens
agcttacaccacgatayagagcactggaattct

SEQ ID NO: 12059 - DNA, 33 bp, homo sapiens
catcagggcttgaaaayagtatataggatcttc

SEQ ID NO: 12060 - DNA, 33 bp, homo sapiens
cctcatacagttcacayatcactgaagcagata

SEQ ID NO: 12061 - DNA, 33 bp, homo sapiens
tatttggccataaagasaaacaaagtactggta

SEQ ID NO: 12062 - DNA, 33 bp, homo sapiens
aatggaccggagaccayggtagtcaataggttc

SEQ ID NO: 12063 - DNA, 33 bp, homo sapiens
gaatctggtagagaacmatacaggcaggatcct

SEQ ID NO: 12064 - DNA, 33 bp, homo sapiens
tgtgtgcagaaagataygcctaggttatatgca

SEQ ID NO: 12065 - DNA, 33 bp, homo sapiens
ttctcataagctaacayaagcagaaaaatctac

SEQ ID NO: 12066 - DNA, 33 bp, homo sapiens
gtatacagtaggcactyaataaacactagtaga

SEQ ID NO: 12067 - DNA, 33 bp, homo sapiens
tattttcccttcatcaytctatagcttttttaa

SEQ ID NO: 12068 - DNA, 33 bp, homo sapiens
cagctgttcctgtccgycagaaatacaaccagt

SEQ ID NO: 12069 - DNA, 33 bp, homo sapiens
ggatgagcaagccctayaataagcttccaagaa

SEQ ID NO: 12070 - DNA, 33 bp, homo sapiens
caggtactctactcaaragaaagcatctgggaa

SEQ ID NO: 12071 - DNA, 33 bp, homo sapiens
caggccaggaggtcaamgttccagagcctcaaa

SEQ ID NO: 12072 - DNA, 33 bp, homo sapiens
tgttctggtcagagacmgtctagaaattctgtc

SEQ ID NO: 12073 - DNA, 33 bp, homo sapiens
tccactttcctaattcragcacttctaggtacg

SEQ ID NO: 12074 - DNA, 33 bp, homo sapiens
ccaagtgacttctacaycagggaattgtattga

SEQ ID NO: 12075 - DNA, 33 bp, homo sapiens
attctacatcttgcccrcaaagccttagcaatg

SEQ ID NO: 12076 - DNA, 33 bp, homo sapiens
ggaaactaataaaatcmacaggaaatgtttttg

SEQ ID NO: 12077 - DNA, 33 bp, homo sapiens
ccaagtgacaaagggcyacatgtgcctcacccg

SEQ ID NO: 12078 - DNA, 33 bp, homo sapiens
tggagtgggaaatagcrgagatggataagttaa

SEQ ID NO: 12079 - DNA, 33 bp, homo sapiens
gcatctaaatcaaggargaattgaataacagga

SEQ ID NO: 12080 - DNA, 33 bp, homo sapiens
caaagcacaatctggaygaatagtaatcaggaa

SEQ ID NO: 12081 - DNA, 33 bp, homo sapiens
tttattagagtgttcamatttgttaagcatcac

SEQ ID NO: 12082 - DNA, 33 bp, homo sapiens
tatacttcccagctccracatctcgtgtgattt

SEQ ID NO: 12083 - DNA, 33 bp, homo sapiens
ttctaattcataaacargattatccactcaaaa

SEQ ID NO: 12084 - DNA, 33 bp, homo sapiens
caggtatcagtgagcartctactagagccggca

SEQ ID NO: 12085 - DNA, 33 bp, homo sapiens
caccaggccctttttcyctcctgccaggcagag

SEQ ID NO: 12086 - DNA, 33 bp, homo sapiens
aagcctaagaaactgargcgttatctatgtctt

SEQ ID NO: 12087 - DNA, 33 bp, homo sapiens
aattttcaatcttgccraccagaatggaaaaat

SEQ ID NO: 12088 - DNA, 33 bp, homo sapiens
aatggttcttgggtacrgataatgttttggttc

SEQ ID NO: 12089 - DNA, 33 bp, homo sapiens
atacttgtgacagatarctagaaagtatgaaag

SEQ ID NO: 12090 - DNA, 33 bp, homo sapiens
agcagaactcacattgraataatattcttattg

SEQ ID NO: 12091 - DNA, 33 bp, homo sapiens
aacatattagatgcttmaacagtactcattaaa

SEQ ID NO: 12092 - DNA, 33 bp, homo sapiens
attgtacttcaaggtayatactgcaaagaattg

SEQ ID NO: 12093 - DNA, 33 bp, homo sapiens
gaagcttcttgtcctcsagactgtgtgctcctt

SEQ ID NO: 12094 - DNA, 33 bp, homo sapiens
cactgcctaagataaargacattgtagctgact

SEQ ID NO: 12095 - DNA, 33 bp, homo sapiens
cgggttttcttgaagascagccgatagaacaga

SEQ ID NO: 12096 - DNA, 33 bp, homo sapiens
ttgattttccttcatarcatctgtaatcaaatc

SEQ ID NO: 12097 - DNA, 33 bp, homo sapiens
caaagcatggtaggacygatgttgaaactaact

SEQ ID NO: 12098 - DNA, 33 bp, homo sapiens
tatgtatatgtactcakgtactgtattagtcca

SEQ ID NO: 12099 - DNA, 33 bp, homo sapiens
tgaaaagatccaacaayaaagaagatatatgga

SEQ ID NO: 12100 - DNA, 33 bp, homo sapiens
agaaattctgggacackaaggttgcccatccag

SEQ ID NO: 12101 - DNA, 33 bp, homo sapiens
tgaagaaaagttgaagraatgatagggaaattg

SEQ ID NO: 12102 - DNA, 33 bp, homo sapiens
cctcaaactatgaaaaytcaaactactataaga

SEQ ID NO: 12103 - DNA, 33 bp, homo sapiens
gatgtgaaccaaagcasagatgtggaatgagat

SEQ ID NO: 12104 - DNA, 33 bp, homo sapiens
gtcactgagctctaacracattttgtcagatgc

SEQ ID NO: 12105 - DNA, 33 bp, homo sapiens
aaatgggaagagtatawcacactggcgtggtct

SEQ ID NO: 12106 - DNA, 33 bp, homo sapiens
agggatgagttccactyagagggcatattaagg

SEQ ID NO: 12107 - DNA, 33 bp, homo sapiens
ccatttagcttctagcratagttttctagagtc

SEQ ID NO: 12108 - DNA, 33 bp, homo sapiens
gaagatgagaaagttgmaatctctctgatggca

SEQ ID NO: 12109 - DNA, 33 bp, homo sapiens
gaagttttaacatagcrcaggaaagaagggcat

SEQ ID NO: 12110 - DNA, 33 bp, homo sapiens
ttttgtctctcctagaygaatttacctttcctc

SEQ ID NO: 12111 - DNA, 33 bp, homo sapiens
gtcctcaaacctcaatmacctcaagtatacaca

SEQ ID NO: 12112 - DNA, 33 bp, homo sapiens
aaaagaaagacagtaamatagttgtgagaatat

SEQ ID NO: 12113 - DNA, 33 bp, homo sapiens
tgaatcatgtatagacrcatctacaagaaacaa

SEQ ID NO: 12114 - DNA, 33 bp, homo sapiens
gtttgtcctgcagaacwgtgtaggagagccagg

SEQ ID NO: 12115 - DNA, 33 bp, homo sapiens
ggtgattttttgagtaygaagccaaatgtacag

SEQ ID NO: 12116 - DNA, 33 bp, homo sapiens
agtgcatttttacttamacttgtgcttctgctg

SEQ ID NO: 12117 - DNA, 33 bp, homo sapiens
atggaagaaattgtagmaaaaggtgtcaggaga

SEQ ID NO: 12118 - DNA, 33 bp, homo sapiens
ctagcataggacatggrccacattagtgacaag

SEQ ID NO: 12119 - DNA, 33 bp, homo sapiens
aggtgtccaccatcaaygttaatgattctgtca

SEQ ID NO: 12120 - DNA, 33 bp, homo sapiens
tccagagaatgaactamacatataacctctctt

SEQ ID NO: 12121 - DNA, 33 bp, homo sapiens
tcattaccctcttacawgaagctggtatgatgt

SEQ ID NO: 12122 - DNA, 33 bp, homo sapiens
gccctactgctgtaggratattcgagtcaccct

SEQ ID NO: 12123 - DNA, 33 bp, homo sapiens
cttagtatttttcgaartgtttttgtgtgtatc

SEQ ID NO: 12124 - DNA, 33 bp, homo sapiens
taggccttttgtgacgmagagttagccaagtta

SEQ ID NO: 12125 - DNA, 33 bp, homo sapiens
gtgtgttttgttttgcyctgtgcaattctgtag

SEQ ID NO: 12126 - DNA, 33 bp, homo sapiens
gtacatagaaccacctraagagaatccgattta

SEQ ID NO: 12127 - DNA, 33 bp, homo sapiens
gctggcatgaatttgcyatattgataaaagaga

SEQ ID NO: 12128 - DNA, 33 bp, homo sapiens
gacagtattcattcackgagtttttgagtaacc

SEQ ID NO: 12129 - DNA, 33 bp, homo sapiens
ttatctcttttttatcmaccaatccgtcttaat

SEQ ID NO: 12130 - DNA, 33 bp, homo sapiens
tccaaatcaagtgacawatctaatggtggctat

SEQ ID NO: 12131 - DNA, 33 bp, homo sapiens
cattaactgtaaactcragtggcaggaatggag

SEQ ID NO: 12132 - DNA, 33 bp, homo sapiens
ttaatagatgactcgayggaaacacatatatta

SEQ ID NO: 12133 - DNA, 33 bp, homo sapiens
atatttacacaaaggaygctcaccacagggtaa

SEQ ID NO: 12134 - DNA, 33 bp, homo sapiens
tgaatactggttcctawcaacgttttagatgag

SEQ ID NO: 12135 - DNA, 33 bp, homo sapiens
aatatctattctgataygttaaatgtttatgac

SEQ ID NO: 12136 - DNA, 33 bp, homo sapiens
tagggatgtagacaagwaagacaaagcaagtca

SEQ ID NO: 12137 - DNA, 33 bp, homo sapiens
attgactcaccattccrcatgtcttggttagcc

SEQ ID NO: 12138 - DNA, 33 bp, homo sapiens
ttataactcgtatggcyatcctaaacacttatg

SEQ ID NO: 12139 - DNA, 33 bp, homo sapiens
atcatacactgtcttaygagatttcttctttgg

SEQ ID NO: 12140 - DNA, 33 bp, homo sapiens
tgttttgatataggtasgcaatgtgggctgatt

SEQ ID NO: 12141 - DNA, 33 bp, homo sapiens
ccccttactgagaatgracacttcctagaagcc

SEQ ID NO: 12142 - DNA, 33 bp, homo sapiens
aaacagaatctgctaakgaaaggaagaaaagta

SEQ ID NO: 12143 - DNA, 33 bp, homo sapiens
atagcctatcttttcaytaggaggtagggtcat

SEQ ID NO: 12144 - DNA, 33 bp, homo sapiens
agacccaggcaggtgaygcttgttaacctcatt

SEQ ID NO: 12145 - DNA, 33 bp, homo sapiens
taggaaatctttgcccrattcaatgtcctggag

SEQ ID NO: 12146 - DNA, 33 bp, homo sapiens
ctggaagatgaggaaarctagtagtgtaattca

SEQ ID NO: 12147 - DNA, 33 bp, homo sapiens
gcacggggagagaaacrggtcctatgggtgtca

SEQ ID NO: 12148 - DNA, 33 bp, homo sapiens
ctgaaagaatgcttaastgattgtttttgggga

SEQ ID NO: 12149 - DNA, 33 bp, homo sapiens
cgggtgtgttggcacakgcatataatcccagct

SEQ ID NO: 12150 - DNA, 33 bp, homo sapiens
aaagagtttcaacaaasctcatgcattcttctc

SEQ ID NO: 12151 - DNA, 33 bp, homo sapiens
taccctgtgaggacacrgcgtttatctcttgcc

SEQ ID NO: 12152 - DNA, 33 bp, homo sapiens
gtctccgtatgaacgawcttttctttccagata

SEQ ID NO: 12153 - DNA, 33 bp, homo sapiens
gcatctggatgtggaamtacaaaggaaaatatt

SEQ ID NO: 12154 - DNA, 33 bp, homo sapiens
gctgggaagctgaaccraagagtggccattgta

SEQ ID NO: 12155 - DNA, 33 bp, homo sapiens
agagaaatatgtatgamtaggcctgtatctgtt

SEQ ID NO: 12156 - DNA, 33 bp, homo sapiens
tgcggcttcgcaggccrcaaataataggaggct

SEQ ID NO: 12157 - DNA, 33 bp, homo sapiens
gtgcaacctgttcccaygagtatatcctagaga

SEQ ID NO: 12158 - DNA, 33 bp, homo sapiens
tagagagcaattttatraacaaagcctttcctc

SEQ ID NO: 12159 - DNA, 33 bp, homo sapiens
atcatggatatgcctaygggagactgcttccaa

SEQ ID NO: 12160 - DNA, 33 bp, homo sapiens
ccagaaagtctgaacaycctattttgtagaccc

SEQ ID NO: 12161 - DNA, 33 bp, homo sapiens
gaaatacactcattctkacagctcttctaattc

SEQ ID NO: 12162 - DNA, 33 bp, homo sapiens
ttaggaagaatgacccmaaattcacagattaag

SEQ ID NO: 12163 - DNA, 33 bp, homo sapiens
ccccattcatttcttasacttgccagcatgacc

SEQ ID NO: 12164 - DNA, 33 bp, homo sapiens
cgcaaagcaaagctgasgaactaccttggtttg

SEQ ID NO: 12165 - DNA, 33 bp, homo sapiens
cctgatacccacacagsaagtcttagttacagg

SEQ ID NO: 12166 - DNA, 33 bp, homo sapiens
gctttgggaagctacartaaatggaaaaaccag

SEQ ID NO: 12167 - DNA, 33 bp, homo sapiens
cagaaatatcagaggayaccgggggtcagtggg

SEQ ID NO: 12168 - DNA, 33 bp, homo sapiens
ggaccaagagaatatawggaaggcagaagcaga

SEQ ID NO: 12169 - DNA, 33 bp, homo sapiens
cagtgccgctgggagaygggcatttattatatc

SEQ ID NO: 12170 - DNA, 33 bp, homo sapiens
aaaaatggaacaatacygcaaaatgagtgatgc

SEQ ID NO: 12171 - DNA, 33 bp, homo sapiens
attaaagacttgcccartggaagaagaaggctt

SEQ ID NO: 12172 - DNA, 33 bp, homo sapiens
tccacatctagggcacraaacgtgttcttggct

SEQ ID NO: 12173 - DNA, 33 bp, homo sapiens
catcaaagccttcccartgagtcttgactatag

SEQ ID NO: 12174 - DNA, 33 bp, homo sapiens
ctgccttgaattgcaawgtaacagtgtgataag

SEQ ID NO: 12175 - DNA, 33 bp, homo sapiens
actggcttccatgtcayaatctggttctcctac

SEQ ID NO: 12176 - DNA, 33 bp, homo sapiens
gctgtttgctgacaccrgagccatccttcccta

SEQ ID NO: 12177 - DNA, 33 bp, homo sapiens
ttgccttctcagtaacmgaagcaaacagtgttc

SEQ ID NO: 12178 - DNA, 33 bp, homo sapiens
agtctcttcatttgccwagggatattttaaaat

SEQ ID NO: 12179 - DNA, 33 bp, homo sapiens
actatgtccaattaaasaaaaaacaacatccaa

SEQ ID NO: 12180 - DNA, 33 bp, homo sapiens
catattccaacatcacwcaattggccacggccc

SEQ ID NO: 12181 - DNA, 33 bp, homo sapiens
ccaggtcttttagccasattggaccactcagca

SEQ ID NO: 12182 - DNA, 33 bp, homo sapiens
ctgtgaaaagcagctcsccaagttctgctatat

SEQ ID NO: 12183 - DNA, 33 bp, homo sapiens
tagtgaggattcctacrctgactaagcacactg

SEQ ID NO: 12184 - DNA, 33 bp, homo sapiens
tgaagcgtctctaatgrcagacagagcccagtg

SEQ ID NO: 12185 - DNA, 33 bp, homo sapiens
agtcactaggaaacaaygctccaatcgcatacc

SEQ ID NO: 12186 - DNA, 33 bp, homo sapiens
ccacagggccatagackctgctcaagttgctgc

SEQ ID NO: 12187 - DNA, 33 bp, homo sapiens
ccccttcctgagtaccygaggcttcacgatatg

SEQ ID NO: 12188 - DNA, 33 bp, homo sapiens
gggcactgggccagacsgaagcacagatggaag

SEQ ID NO: 12189 - DNA, 33 bp, homo sapiens
cttgtgggttagaacarctggcaaaagaggtag

SEQ ID NO: 12190 - DNA, 33 bp, homo sapiens
aaaccaaaattctccaygtatcccagggaggtg

SEQ ID NO: 12191 - DNA, 33 bp, homo sapiens
caactacatggaaggayactttgaatagatgga

SEQ ID NO: 12192 - DNA, 33 bp, homo sapiens
tcctacctttgtcatcygaccctgctctctttt

SEQ ID NO: 12193 - DNA, 33 bp, homo sapiens
gtctcttccttcccaamccgggtcttctgtgtt

SEQ ID NO: 12194 - DNA, 33 bp, homo sapiens
gagactttcaagccacragcagaatttttttct

SEQ ID NO: 12195 - DNA, 33 bp, homo sapiens
gaatgtgatgaaatgayacgtttggctgcattt

SEQ ID NO: 12196 - DNA, 33 bp, homo sapiens
atggaccaatgagttaygataacaagtactttt

SEQ ID NO: 12197 - DNA, 33 bp, homo sapiens
atggtattagtaaataygacttcccttcctcct

SEQ ID NO: 12198 - DNA, 33 bp, homo sapiens
tctattttgcccacgtkacaaaactcttctatt

SEQ ID NO: 12199 - DNA, 33 bp, homo sapiens
agcacccctctcagccmaatgcagatgtgttag

SEQ ID NO: 12200 - DNA, 33 bp, homo sapiens
gggagaataaaggaaargacaggctcctgttca

SEQ ID NO: 12201 - DNA, 33 bp, homo sapiens
catgtgtgtgcatcctyaggaagtgtgtgtgct

SEQ ID NO: 12202 - DNA, 33 bp, homo sapiens
gttatcaaaatgtataycagaattgtgctgtaa

SEQ ID NO: 12203 - DNA, 33 bp, homo sapiens
ccttcctttcaactaasctggtaatgcatatga

SEQ ID NO: 12204 - DNA, 33 bp, homo sapiens
aatggttcaggatcagyattaagccatgtccta

SEQ ID NO: 12205 - DNA, 33 bp, homo sapiens
agctcaatagccgaatsaagacgacagaagaaa

SEQ ID NO: 12206 - DNA, 33 bp, homo sapiens
ctttcttctcttcacamtctcccggcctccctc

SEQ ID NO: 12207 - DNA, 33 bp, homo sapiens
gtacaaaagctccaaargaacaggaacaaggag

SEQ ID NO: 12208 - DNA, 33 bp, homo sapiens
taattctattgtcgtcratcacaaccctggtca

SEQ ID NO: 12209 - DNA, 33 bp, homo sapiens
ttgtaggagaaatgtayggcttcatctcatttc

SEQ ID NO: 12210 - DNA, 33 bp, homo sapiens
agatgaagcaagtgccrcaacacctgtgctccc

SEQ ID NO: 12211 - DNA, 33 bp, homo sapiens
acaccaagcctgggaaktgggaattattgtctt

SEQ ID NO: 12212 - DNA, 33 bp, homo sapiens
ttcattggtggtaacawgatctgggcttgaaat

SEQ ID NO: 12213 - DNA, 33 bp, homo sapiens
caaagactccacttaaygttggtctgttgactg

SEQ ID NO: 12214 - DNA, 33 bp, homo sapiens
gtgtaatctttataacmacccttcaggatgagt

SEQ ID NO: 12215 - DNA, 33 bp, homo sapiens
ggaaaatccatttctcrccacatttaattttct

SEQ ID NO: 12216 - DNA, 33 bp, homo sapiens
catctccatctgctggmaatttaaatgtctgca

SEQ ID NO: 12217 - DNA, 33 bp, homo sapiens
tcagaatatccgcatcygactcctaaggcaggt

SEQ ID NO: 12218 - DNA, 33 bp, homo sapiens
caacagcattcatcatmatatttgttgaatgca

SEQ ID NO: 12219 - DNA, 33 bp, homo sapiens
aattctagagataagcmcactaaagtttagaaa

SEQ ID NO: 12220 - DNA, 33 bp, homo sapiens
tttgtctttccaggacygcaatgaatgattagg

SEQ ID NO: 12221 - DNA, 33 bp, homo sapiens
tcagagttcagcccccractttgaaccttccca

SEQ ID NO: 12222 - DNA, 33 bp, homo sapiens
tcgtgattcagtgactyagcatacattggcaat

SEQ ID NO: 12223 - DNA, 33 bp, homo sapiens
caacacatatttcctcygaaacatcagtgctga

SEQ ID NO: 12224 - DNA, 33 bp, homo sapiens
tttgcttatttcaaaaygctttagacttactaa

SEQ ID NO: 12225 - DNA, 33 bp, homo sapiens
gctgtttagatgcatayacctttatggctgtta

SEQ ID NO: 12226 - DNA, 33 bp, homo sapiens
cctgctttgggcactayattcctttcatgagca

SEQ ID NO: 12227 - DNA, 33 bp, homo sapiens
ccatattatagaaaacscttaatgctagaagtc

SEQ ID NO: 12228 - DNA, 33 bp, homo sapiens
aaaatgctaatccaaayaagggcaggttggaga

SEQ ID NO: 12229 - DNA, 33 bp, homo sapiens
gagccctgtaagacaayggccataacgttatct

SEQ ID NO: 12230 - DNA, 33 bp, homo sapiens
aggtggtctccaggcasgtgaaggatgacctta

SEQ ID NO: 12231 - DNA, 33 bp, homo sapiens
cagattaatggctgccmgcaattgggaatggaa

SEQ ID NO: 12232 - DNA, 33 bp, homo sapiens
cgacaaagatattcacrcaggaacagatttggg

SEQ ID NO: 12233 - DNA, 33 bp, homo sapiens
tatgttgatccaaagaytcaggaattaaaaagt

SEQ ID NO: 12234 - DNA, 33 bp, homo sapiens
ttgtaattgcattgaartccatgtgcttgctga

SEQ ID NO: 12235 - DNA, 33 bp, homo sapiens
cttggtttggtacccastgatggttgttgtggc

SEQ ID NO: 12236 - DNA, 33 bp, homo sapiens
tcacaacccctacagaygatactttagcagtca

SEQ ID NO: 12237 - DNA, 33 bp, homo sapiens
cttgaaccctgagacastctgctttgttacatg

SEQ ID NO: 12238 - DNA, 33 bp, homo sapiens
gctctgactagtctcawctctgtgatcttgggc

SEQ ID NO: 12239 - DNA, 33 bp, homo sapiens
gatgcacactcttaacrcatatgtacacgctct

SEQ ID NO: 12240 - DNA, 33 bp, homo sapiens
ttacgtcaggtatttcrctgtttgctggcatta

SEQ ID NO: 12241 - DNA, 33 bp, homo sapiens
aaccggcccacaggackgcgatgaaagaatgca

SEQ ID NO: 12242 - DNA, 33 bp, homo sapiens
cgctcacatacccctcrctacactacgcctggc

SEQ ID NO: 12243 - DNA, 33 bp, homo sapiens
aggtagaatagactggraaagcaaccaataagc

SEQ ID NO: 12244 - DNA, 33 bp, homo sapiens
gccacctcccattctaycatctgggagcaccgt

SEQ ID NO: 12245 - DNA, 33 bp, homo sapiens
gcagttggggaaggtamctgttactcactcgtt

SEQ ID NO: 12246 - DNA, 33 bp, homo sapiens
atttggaacaatattgragtctaaaatgaatac

SEQ ID NO: 12247 - DNA, 33 bp, homo sapiens
atgattaccgcttaaartagcacctagtattta

SEQ ID NO: 12248 - DNA, 33 bp, homo sapiens
gtaatgctaccttgtayacctgctataaagatg

SEQ ID NO: 12249 - DNA, 33 bp, homo sapiens
tgggaaaggactatcaygcctcccgccaagtcc

SEQ ID NO: 12250 - DNA, 33 bp, homo sapiens
tccttttatcgccattyaaaaaaattgttgctg

SEQ ID NO: 12251 - DNA, 33 bp, homo sapiens
attttctctaggaaatsatgttcaggattgctt

SEQ ID NO: 12252 - DNA, 33 bp, homo sapiens
tgaaatgcagacagccmgagagttgttatctaa

SEQ ID NO: 12253 - DNA, 33 bp, homo sapiens
caagacacccatgaaartgacaaagtgagagga

SEQ ID NO: 12254 - DNA, 33 bp, homo sapiens
tcaatcacaatagagcrctgagttctgaaaaac

SEQ ID NO: 12255 - DNA, 33 bp, homo sapiens
tttattgtgtagtcatrataatggaacagtaga

SEQ ID NO: 12256 - DNA, 33 bp, homo sapiens
aaggggtttgaagtaayagtgcgagaaggaagg

SEQ ID NO: 12257 - DNA, 33 bp, homo sapiens
ggtatagtatatcagcycgacctcagattggct

SEQ ID NO: 12258 - DNA, 33 bp, homo sapiens
tatgtgaaagaaacaargaaagatccaatgttc

SEQ ID NO: 12259 - DNA, 33 bp, homo sapiens
catgatcatgctcttarggagtctttacaaacc

SEQ ID NO: 12260 - DNA, 33 bp, homo sapiens
ctgacctggcttcagcyaaaagaaagcagcaga

SEQ ID NO: 12261 - DNA, 33 bp, homo sapiens
ggagaaagttgctcaartaattggatattgctt

SEQ ID NO: 12262 - DNA, 33 bp, homo sapiens
attgacacacaggttayggactcagacagatgg

SEQ ID NO: 12263 - DNA, 33 bp, homo sapiens
tgttacaatagaggaayggtaaaaagatggaat

SEQ ID NO: 12264 - DNA, 33 bp, homo sapiens
tggccagtcccatcacraggctatctaagggct

SEQ ID NO: 12265 - DNA, 33 bp, homo sapiens
aagggaaattgcttgaygtgggattgtgagatc

SEQ ID NO: 12266 - DNA, 33 bp, homo sapiens
atgatcgggtcattcayggtcttctgtccactg

SEQ ID NO: 12267 - DNA, 33 bp, homo sapiens
agcttccaagaggaaaytgaagaataggataca

SEQ ID NO: 12268 - DNA, 33 bp, homo sapiens
aatatgaatgtcagacraatttcctgactagac

SEQ ID NO: 12269 - DNA, 33 bp, homo sapiens
gtggacaaagcactgasgtgtgagaagcaaaaa

SEQ ID NO: 12270 - DNA, 33 bp, homo sapiens
agtgcttggtacataayagtttgccccaagaac

SEQ ID NO: 12271 - DNA, 33 bp, homo sapiens
ctgcaccatgttcaatmaagtcagcctgaaagc

SEQ ID NO: 12272 - DNA, 33 bp, homo sapiens
gacttatctacaggggyatcctaattgcccacc

SEQ ID NO: 12273 - DNA, 33 bp, homo sapiens
tgcctttccttgcagartctctttcctaaatgg

SEQ ID NO: 12274 - DNA, 33 bp, homo sapiens
catgactaggaaatgckagagacagaatcggac

SEQ ID NO: 12275 - DNA, 33 bp, homo sapiens
taaaagaggaaacaggkagcaaagttgtaaaca

SEQ ID NO: 12276 - DNA, 33 bp, homo sapiens
ggaggaagaactgccartgcctttttaaaacgc

SEQ ID NO: 12277 - DNA, 33 bp, homo sapiens
ccatttatggatttcaragtatcttatgtgggg

SEQ ID NO: 12278 - DNA, 33 bp, homo sapiens
tgttggtcagcactgakaaaggaagtatggggt

SEQ ID NO: 12279 - DNA, 33 bp, homo sapiens
gaattttaatacaccaygtgcttttctgagttt

SEQ ID NO: 12280 - DNA, 33 bp, homo sapiens
ctcttgttggctttaaytgttgctaaaatcgaa

SEQ ID NO: 12281 - DNA, 33 bp, homo sapiens
tcctgctggtattggarcagattgccagttttt

SEQ ID NO: 12282 - DNA, 33 bp, homo sapiens
gtatatctgtggtattraagtttcatgaagtga

SEQ ID NO: 12283 - DNA, 33 bp, homo sapiens
ctctttctgtgtttacyagaatttagtgcttta

SEQ ID NO: 12284 - DNA, 33 bp, homo sapiens
ttctttcacagcaatamccctgatgtttgttat

SEQ ID NO: 12285 - DNA, 33 bp, homo sapiens
caaagccagatgtgacrataaaaataaactgat

SEQ ID NO: 12286 - DNA, 33 bp, homo sapiens
catgctctccagttgaygaaccatggtgtgggt

SEQ ID NO: 12287 - DNA, 33 bp, homo sapiens
ctacaataagaaggccrgcttgatttcatttca

SEQ ID NO: 12288 - DNA, 33 bp, homo sapiens
ccatcatattagggatwaagatttcaatgcaaa

SEQ ID NO: 12289 - DNA, 33 bp, homo sapiens
cactgacaattatagtyaaaacactgtgtatca

SEQ ID NO: 12290 - DNA, 33 bp, homo sapiens
taacagcacattgaaasagtcaaacactgagat

SEQ ID NO: 12291 - DNA, 33 bp, homo sapiens
tcctctatttttcacaytagtgcacattttact

SEQ ID NO: 12292 - DNA, 33 bp, homo sapiens
agcaattcatttaaacmcagcaaatgtgcttgg

SEQ ID NO: 12293 - DNA, 33 bp, homo sapiens
tgtagatcataaacaaygcctttattatacttt

SEQ ID NO: 12294 - DNA, 33 bp, homo sapiens
ttagggtggcgataccrcttactatagaaagtt

SEQ ID NO: 12295 - DNA, 33 bp, homo sapiens
tgggacagatttaaaasaatactcctatacatt

SEQ ID NO: 12296 - DNA, 33 bp, homo sapiens
tgtttgcaagacattckaacctactgatatgag

SEQ ID NO: 12297 - DNA, 33 bp, homo sapiens
atggagctcatgaagtwaagtaaacagattgca

SEQ ID NO: 12298 - DNA, 33 bp, homo sapiens
gagaaaaaagcttggamatcatccaagttctcc

SEQ ID NO: 12299 - DNA, 33 bp, homo sapiens
ggctctcttagataaaygaaagcatctttttaa

SEQ ID NO: 12300 - DNA, 33 bp, homo sapiens
aagactcgccaggatgyaaataaaatcagcata

SEQ ID NO: 12301 - DNA, 33 bp, homo sapiens
tgttcatgtgtgtttcycaatgtttgcataaat

SEQ ID NO: 12302 - DNA, 33 bp, homo sapiens
ggccaaagaattgtgcwacttgtgcatgagaaa

SEQ ID NO: 12303 - DNA, 33 bp, homo sapiens
tgatgtcagagacaggractcaccagtggtcta

SEQ ID NO: 12304 - DNA, 33 bp, homo sapiens
taaatcaagtgtttaargagggacattcacgtc

SEQ ID NO: 12305 - DNA, 33 bp, homo sapiens
tgccacctcataaccaytagggtggacactaaa

SEQ ID NO: 12306 - DNA, 33 bp, homo sapiens
atgagacttatagctgwaaccctgttgctgctt

SEQ ID NO: 12307 - DNA, 33 bp, homo sapiens
ttcaacacgttcaacaraggaatatcttaaggt

SEQ ID NO: 12308 - DNA, 33 bp, homo sapiens
agggcactatggaaacrgatcgccctgctctct

SEQ ID NO: 12309 - DNA, 33 bp, homo sapiens
caagagtagggtggtasaaggagaaacggtgag

SEQ ID NO: 12310 - DNA, 33 bp, homo sapiens
ccttcctcagaaaatamaaaagagtggctgggc

SEQ ID NO: 12311 - DNA, 33 bp, homo sapiens
aaagttccatgtgatcmaatatctgagtgataa

SEQ ID NO: 12312 - DNA, 33 bp, homo sapiens
agggccatgaaggaacsacaaaggtcccatgcc

SEQ ID NO: 12313 - DNA, 33 bp, homo sapiens
tgggagttcgtggaccrgagaaaaggaagcccc

SEQ ID NO: 12314 - DNA, 33 bp, homo sapiens
gggcttgctgggccaamgcttatatgcattcgt

SEQ ID NO: 12315 - DNA, 33 bp, homo sapiens
ttattttcacacaaaasgtggcatagtgcacta

SEQ ID NO: 12316 - DNA, 33 bp, homo sapiens
agtagaaactagaacaytgaaactcttgctttc

SEQ ID NO: 12317 - DNA, 33 bp, homo sapiens
tctctgtagtttctcartctctggactattgac

SEQ ID NO: 12318 - DNA, 33 bp, homo sapiens
gtacagtgcacgtcacrggaaggcatcagagga

SEQ ID NO: 12319 - DNA, 33 bp, homo sapiens
cgttgctgaagtctccscgacctttattgtttt

SEQ ID NO: 12320 - DNA, 33 bp, homo sapiens
tgccgtttttgtagacrctgttattctttttcc

SEQ ID NO: 12321 - DNA, 33 bp, homo sapiens
tccaaacctggtaacaytgccattccctctgtg

SEQ ID NO: 12322 - DNA, 33 bp, homo sapiens
gttttatatttctcacmaaaaaattagagtaag

SEQ ID NO: 12323 - DNA, 33 bp, homo sapiens
aattcccaaaaaataaygccctgctatttgcca

SEQ ID NO: 12324 - DNA, 33 bp, homo sapiens
ctgaatatgctgtttcraatttcaaatgtgcat

SEQ ID NO: 12325 - DNA, 33 bp, homo sapiens
ctgacctccatttttcyactggcaagagtaaag

SEQ ID NO: 12326 - DNA, 33 bp, homo sapiens
aagattactctgccagmactctggtcggcctac

SEQ ID NO: 12327 - DNA, 33 bp, homo sapiens
tagcttagggcttaacrgctttttggattggtc

SEQ ID NO: 12328 - DNA, 33 bp, homo sapiens
tgaagtgagtggccatragcccattgtaaatat

SEQ ID NO: 12329 - DNA, 33 bp, homo sapiens
aagcttaaaactctgcraactaagttatatatg

SEQ ID NO: 12330 - DNA, 33 bp, homo sapiens
catcctgcctctgctayacaagctctctcttgc

SEQ ID NO: 12331 - DNA, 33 bp, homo sapiens
cccttgctgcaccaagwaaaagagctaacatat

SEQ ID NO: 12332 - DNA, 33 bp, homo sapiens
cccttctgacaagccaytaccaggataagtaca

SEQ ID NO: 12333 - DNA, 33 bp, homo sapiens
agatgccatgttctacmcaatgtgcaagttgaa

SEQ ID NO: 12334 - DNA, 33 bp, homo sapiens
agtctgctactgtcctmagcatcaaaactgtag

SEQ ID NO: 12335 - DNA, 33 bp, homo sapiens
tcaagagatgactcatraaagacttgataagct

SEQ ID NO: 12336 - DNA, 33 bp, homo sapiens
cctgcacccactgcggrcacagcaaattaaata

SEQ ID NO: 12337 - DNA, 33 bp, homo sapiens
atgttgctcttgaaagycacttgccaaactcat

SEQ ID NO: 12338 - DNA, 33 bp, homo sapiens
cagcttgacagcattgyaattttttgagcccaa

SEQ ID NO: 12339 - DNA, 33 bp, homo sapiens
cagaagtgaaaatatgmcagggattgaggcaca

SEQ ID NO: 12340 - DNA, 33 bp, homo sapiens
actcatgtaatgggacratcatcccaccaaatt

SEQ ID NO: 12341 - DNA, 33 bp, homo sapiens
ccaatccagtggcgagsaatgtccaaaccaaag

SEQ ID NO: 12342 - DNA, 33 bp, homo sapiens
cctaatgtgtggtataycttgcaaagcttatca

SEQ ID NO: 12343 - DNA, 33 bp, homo sapiens
atcataccatctttatraaaaatcatcctattg

SEQ ID NO: 12344 - DNA, 33 bp, homo sapiens
atattattctctaaaamagtctccgttcattaa

SEQ ID NO: 12345 - DNA, 33 bp, homo sapiens
tcaaatggattaaatarggcatggattagataa

SEQ ID NO: 12346 - DNA, 33 bp, homo sapiens
acaggtttcttgccackgaatggtgctgaagct

SEQ ID NO: 12347 - DNA, 33 bp, homo sapiens
aaaattaaaacaacccrgcattgtgacccacat

SEQ ID NO: 12348 - DNA, 33 bp, homo sapiens
ggcagctgtcatcagcracgcatagttatgtac

SEQ ID NO: 12349 - DNA, 33 bp, homo sapiens
tggctggaacactgacyggtttggaggtactgg

SEQ ID NO: 12350 - DNA, 33 bp, homo sapiens
aagcttagcattgagawgacgatgtcaacagat

SEQ ID NO: 12351 - DNA, 33 bp, homo sapiens
tcattggtcatttgtaygatctgtgttaaagtt

SEQ ID NO: 12352 - DNA, 33 bp, homo sapiens
aaatcagaacttaattyaaagtgagaagagcaa

SEQ ID NO: 12353 - DNA, 33 bp, homo sapiens
ctcaattaaaatttgcrctaaaactatgttctc

SEQ ID NO: 12354 - DNA, 33 bp, homo sapiens
gttctattagtttgtakaggtcagatgtttggt

SEQ ID NO: 12355 - DNA, 33 bp, homo sapiens
tccagctccgaaacaaygcccagtagttgttga

SEQ ID NO: 12356 - DNA, 33 bp, homo sapiens
accaaatcacagtccarctaataatcttccaga

SEQ ID NO: 12357 - DNA, 33 bp, homo sapiens
gaacctccaactggccrcagcacagctttatgg

SEQ ID NO: 12358 - DNA, 33 bp, homo sapiens
gtcacacacatctgacractgttgattacctag

SEQ ID NO: 12359 - DNA, 33 bp, homo sapiens
gttaacacctaatgacygatcctttttccgaag

SEQ ID NO: 12360 - DNA, 33 bp, homo sapiens
aagtctccctattcaaygtagatactgttttaa

SEQ ID NO: 12361 - DNA, 33 bp, homo sapiens
ctttcttagcctgggamtatctaagcctttatc

SEQ ID NO: 12362 - DNA, 33 bp, homo sapiens
tttattaatgggttaayctacggccatcagcct

SEQ ID NO: 12363 - DNA, 33 bp, homo sapiens
gagtagtttaatcccamgtttccaccagggttc

SEQ ID NO: 12364 - DNA, 33 bp, homo sapiens
agccctgacttctacaygcaagtgaagagctgt

SEQ ID NO: 12365 - DNA, 33 bp, homo sapiens
acttgcaagcgtaatcyattgttatgagttatt

SEQ ID NO: 12366 - DNA, 33 bp, homo sapiens
ggtcatgtcgctaaagwccttccttggaggaag

SEQ ID NO: 12367 - DNA, 33 bp, homo sapiens
ggaccagatgtgatgargttaataaaacataca

SEQ ID NO: 12368 - DNA, 33 bp, homo sapiens
ggctcattcgcttcaartaactctcgagtggcg

SEQ ID NO: 12369 - DNA, 33 bp, homo sapiens
cacctgtgttcacaacyggaaaatgagaaagca

SEQ ID NO: 12370 - DNA, 33 bp, homo sapiens
tctgctccaagaggacragaagagtttaatact

SEQ ID NO: 12371 - DNA, 33 bp, homo sapiens
ctaaaagcactcctacratcactgtaatattct

SEQ ID NO: 12372 - DNA, 33 bp, homo sapiens
cggtcactgtggtctcrgaagacgggctcagaa

SEQ ID NO: 12373 - DNA, 33 bp, homo sapiens
gtttaagatgctgttakgatctctatcactagc

SEQ ID NO: 12374 - DNA, 33 bp, homo sapiens
ttcttcagcaagtgaartgaaaggtaattctcc

SEQ ID NO: 12375 - DNA, 33 bp, homo sapiens
gtacactcaagtcaccygacgtcggcaagctca

SEQ ID NO: 12376 - DNA, 33 bp, homo sapiens
aagacccgggacccaaygtaggcattgttcgca

SEQ ID NO: 12377 - DNA, 33 bp, homo sapiens
caggggtgcgtactccrgcagaaaaggaaaata

SEQ ID NO: 12378 - DNA, 33 bp, homo sapiens
ctcttccttccatctcyaggaccatcaccaccg

SEQ ID NO: 12379 - DNA, 33 bp, homo sapiens
acagttgggaagaagaygaatatgactactatt

SEQ ID NO: 12380 - DNA, 33 bp, homo sapiens
aaacccaacattacccmgataccaaatccaaac

SEQ ID NO: 12381 - DNA, 33 bp, homo sapiens
tattcaataatgacaamgctgacatctgaagat

SEQ ID NO: 12382 - DNA, 33 bp, homo sapiens
accagtttgcaaataargacaccatgagacagg

SEQ ID NO: 12383 - DNA, 33 bp, homo sapiens
aacgtggacctggaaakacctctcaggatgcaa

SEQ ID NO: 12384 - DNA, 33 bp, homo sapiens
acagaagcacagggccmaggagctcgtggaagg

SEQ ID NO: 12385 - DNA, 33 bp, homo sapiens
cctggaaggaaaaagaygttacactcaaagaat

SEQ ID NO: 12386 - DNA, 33 bp, homo sapiens
aatggaatggaagagayggcccagacacagccc

SEQ ID NO: 12387 - DNA, 33 bp, homo sapiens
ggtgctgagaggaagaygcccccgaacaagaat

SEQ ID NO: 12388 - DNA, 33 bp, homo sapiens
tgaattgcttgttataktaaatggtgactgaga

SEQ ID NO: 12389 - DNA, 33 bp, homo sapiens
tcccatggacgatgtaragaaactggtatccat

SEQ ID NO: 12390 - DNA, 33 bp, homo sapiens
attttgtaaaatttgcycaactttagcatatag

SEQ ID NO: 12391 - DNA, 33 bp, homo sapiens
actgaaaactgcccackggctacccatagcaga

SEQ ID NO: 12392 - DNA, 33 bp, homo sapiens
tcactcatttagcaacyattttctgagcagaat

SEQ ID NO: 12393 - DNA, 33 bp, homo sapiens
ggactgcgatttcatasatggggaaaccgaggc

SEQ ID NO: 12394 - DNA, 33 bp, homo sapiens
ctgggcaacgtccagaragcgccaagtagtgcc

SEQ ID NO: 12395 - DNA, 33 bp, homo sapiens
gatcgtgtgattgaaasattattcttgtagttt

SEQ ID NO: 12396 - DNA, 33 bp, homo sapiens
aattcctagcttgcgayctgcgcttctgacaga

SEQ ID NO: 12397 - DNA, 33 bp, homo sapiens
gcatgaaatgatgaccrcagagactgcatgaaa

SEQ ID NO: 12398 - DNA, 33 bp, homo sapiens
tggagaatggaaggagmagccacgtgagcaaga

SEQ ID NO: 12399 - DNA, 33 bp, homo sapiens
cctcagattttgttcargttgactgagcaccca

SEQ ID NO: 12400 - DNA, 33 bp, homo sapiens
ccccatgtagtagagtsaaagacatgaacccag

SEQ ID NO: 12401 - DNA, 33 bp, homo sapiens
cccacaggagaccggaygcgagcaagcgcacag

SEQ ID NO: 12402 - DNA, 33 bp, homo sapiens
acacgtctgaccaccawgaatacaggtagcagg

SEQ ID NO: 12403 - DNA, 33 bp, homo sapiens
ggaccctggagtttaastacatccactgcttga

SEQ ID NO: 12404 - DNA, 33 bp, homo sapiens
ggcagaggagaaggaaratatgtgtggggggta

SEQ ID NO: 12405 - DNA, 33 bp, homo sapiens
ttctcttgggtctcaarcaatgagaagctctga

SEQ ID NO: 12406 - DNA, 33 bp, homo sapiens
attcccactgtcattaygttagaccacatcacc

SEQ ID NO: 12407 - DNA, 33 bp, homo sapiens
aagggatccaatggcamtaggacgtcttccttg

SEQ ID NO: 12408 - DNA, 33 bp, homo sapiens
tatctccatcgtcttamactctgaaagggccac

SEQ ID NO: 12409 - DNA, 33 bp, homo sapiens
aatgtacatttaatacycgggaatgatgtcagt

SEQ ID NO: 12410 - DNA, 33 bp, homo sapiens
tcctatatctgagagaygttgctttgtaaacct

SEQ ID NO: 12411 - DNA, 33 bp, homo sapiens
ctatgttcagaacagaygaaacctcaccctatc

SEQ ID NO: 12412 - DNA, 33 bp, homo sapiens
ttcactttcaaaagtasggaacaatttgaacct

SEQ ID NO: 12413 - DNA, 33 bp, homo sapiens
aggactgctttctggtracacttttaacgattc

SEQ ID NO: 12414 - DNA, 33 bp, homo sapiens
aatgctttaggacctartaattactcacaagag

SEQ ID NO: 12415 - DNA, 33 bp, homo sapiens
gaagtcgtttaacctcyatgaacctcagcttcc

SEQ ID NO: 12416 - DNA, 33 bp, homo sapiens
gacaacacaaacttcaractgcaaggggccatc

SEQ ID NO: 12417 - DNA, 33 bp, homo sapiens
atgcctgggcaagtgaygggattgtcgaggaat

SEQ ID NO: 12418 - DNA, 33 bp, homo sapiens
ctcaacagttttggaascttaggcaggcaggtt

SEQ ID NO: 12419 - DNA, 33 bp, homo sapiens
gtgtctccactaccccygattcaaatgctcaaa

SEQ ID NO: 12420 - DNA, 33 bp, homo sapiens
gactgaattactggcarcaattcttccattctt

SEQ ID NO: 12421 - DNA, 33 bp, homo sapiens
catgtagccactacaarctagaagaatagactc

SEQ ID NO: 12422 - DNA, 33 bp, homo sapiens
gaggtagcttaagggayggatagatggataacc

SEQ ID NO: 12423 - DNA, 33 bp, homo sapiens
gtgtcaatctaccaccmaagaatcttttttcag

SEQ ID NO: 12424 - DNA, 33 bp, homo sapiens
aaacttgctctacaaasctagaaccatgcaagg

SEQ ID NO: 12425 - DNA, 33 bp, homo sapiens
ccagcaaccatggtagwcagctcagaatattag

SEQ ID NO: 12426 - DNA, 33 bp, homo sapiens
ccccagctgagagtgcratccctgactgggagg

SEQ ID NO: 12427 - DNA, 33 bp, homo sapiens
catttcatttgggctasatcctcacaaactatg

SEQ ID NO: 12428 - DNA, 33 bp, homo sapiens
tgaggcctttcccagcragaccaggatgatttt

SEQ ID NO: 12429 - DNA, 33 bp, homo sapiens
aaacttatattcattaycgtggttaacaaaatc

SEQ ID NO: 12430 - DNA, 33 bp, homo sapiens
actgaccttgatccaaygcatccgccttattcg

SEQ ID NO: 12431 - DNA, 33 bp, homo sapiens
ttcagttcttctcctcmgagactgcactgtagc

SEQ ID NO: 12432 - DNA, 33 bp, homo sapiens
aaccactcagggcaacraatgggagaagggcaa

SEQ ID NO: 12433 - DNA, 33 bp, homo sapiens
catatttaaggacaagsacaaagaactcttagt

SEQ ID NO: 12434 - DNA, 33 bp, homo sapiens
ggattttcaatgcaaayggacatatatttccta

SEQ ID NO: 12435 - DNA, 33 bp, homo sapiens
tatgcctaagactggawtcaatcagttgtgtca

SEQ ID NO: 12436 - DNA, 33 bp, homo sapiens
gtggactgggagaacayggttaaagtaaaggtt

SEQ ID NO: 12437 - DNA, 33 bp, homo sapiens
agaagtgtagcatgggwatcaccaggtttacaa

SEQ ID NO: 12438 - DNA, 33 bp, homo sapiens
atttactgagaacttamcacggactccaggtca

SEQ ID NO: 12439 - DNA, 33 bp, homo sapiens
aagtagggactgtggasattgaagcagaggatg

SEQ ID NO: 12440 - DNA, 33 bp, homo sapiens
tacaatcaatgtcgccrccttcatgtgatagtc

SEQ ID NO: 12441 - DNA, 33 bp, homo sapiens
agtagatttgggtaacrgctgctctggtgtggt

SEQ ID NO: 12442 - DNA, 33 bp, homo sapiens
caggggcctccactacycttggcagacaagaaa

SEQ ID NO: 12443 - DNA, 33 bp, homo sapiens
aggtaattgtgttttgyagcagttcgtaagtct

SEQ ID NO: 12444 - DNA, 33 bp, homo sapiens
gggatcttggcaagtcrcatgatcccttagact

SEQ ID NO: 12445 - DNA, 33 bp, homo sapiens
gtgtgaaggaaacttaycagagcatctgtttgg

SEQ ID NO: 12446 - DNA, 33 bp, homo sapiens
tgtcagcacatctagasaggaaatagcaaccag

SEQ ID NO: 12447 - DNA, 33 bp, homo sapiens
ttgatatctaaaccaargaggaaatctgttctg

SEQ ID NO: 12448 - DNA, 33 bp, homo sapiens
gcaaaaggtcacagtasagaaacagatacacag

SEQ ID NO: 12449 - DNA, 33 bp, homo sapiens
gtcttaaggatgaggargttgagggacgaagag

SEQ ID NO: 12450 - DNA, 33 bp, homo sapiens
aataacaatactggccrccgtttattgagcacc

SEQ ID NO: 12451 - DNA, 33 bp, homo sapiens
gaaaataggtaagcaartaagttgcaaaagcac

SEQ ID NO: 12452 - DNA, 33 bp, homo sapiens
ggccatactgagcacaycaaacgagagttcaaa

SEQ ID NO: 12453 - DNA, 33 bp, homo sapiens
aggggcatgctaagaamtgaatttgggccaggc

SEQ ID NO: 12454 - DNA, 33 bp, homo sapiens
cagaagcctctctgccrggacttagacacaatc

SEQ ID NO: 12455 - DNA, 33 bp, homo sapiens
ctgtggaaacaggaagwctgagacctagagaag

SEQ ID NO: 12456 - DNA, 33 bp, homo sapiens
actagcatgtattaaasaccgactttttattca

SEQ ID NO: 12457 - DNA, 33 bp, homo sapiens
ctcgcggcattgatgcrcagcttgaaaaggctt

SEQ ID NO: 12458 - DNA, 33 bp, homo sapiens
tcctgagtattctccartattaggacgcgaata

SEQ ID NO: 12459 - DNA, 33 bp, homo sapiens
tgctccacgaagggacygaatgccttgaccaag

SEQ ID NO: 12460 - DNA, 33 bp, homo sapiens
ttctctcagaagtggaygccaagaaggaatttg

SEQ ID NO: 12461 - DNA, 33 bp, homo sapiens
ttttcaattgagaaagyaatcttcagtgcaaag

SEQ ID NO: 12462 - DNA, 33 bp, homo sapiens
tcaagtgttcatacaartatttattgggcatgg

SEQ ID NO: 12463 - DNA, 33 bp, homo sapiens
ttatgaggtccatgaasatctacattttgcatt

SEQ ID NO: 12464 - DNA, 33 bp, homo sapiens
atggaatatttgcaggkagagcattctgggtag

SEQ ID NO: 12465 - DNA, 33 bp, homo sapiens
agtggttctcaaccaastaggtcagttaacaat

SEQ ID NO: 12466 - DNA, 33 bp, homo sapiens
atatatacgattgctaygttacttgtatttctg

SEQ ID NO: 12467 - DNA, 33 bp, homo sapiens
atcgtatatatggcaartaataacatgacaaat

SEQ ID NO: 12468 - DNA, 33 bp, homo sapiens
tgagtactttgccaaawtatagggattagaaaa

SEQ ID NO: 12469 - DNA, 33 bp, homo sapiens
gtttaactgggttaagkataaattcctgcaatt

SEQ ID NO: 12470 - DNA, 33 bp, homo sapiens
tcaaataatggacttargagacccaggagctgc

SEQ ID NO: 12471 - DNA, 33 bp, homo sapiens
ggacacactgtgagtasatgacagcaaaagcag

SEQ ID NO: 12472 - DNA, 33 bp, homo sapiens
actcaatctcattcaawcacatttcttctctgg

SEQ ID NO: 12473 - DNA, 33 bp, homo sapiens
ttaactcactgcataastctctttgttcatggc

SEQ ID NO: 12474 - DNA, 33 bp, homo sapiens
gccaggacaaggaagargagattaagaatccct

SEQ ID NO: 12475 - DNA, 33 bp, homo sapiens
tttatacatcgtataakctactttgagtcaagg

SEQ ID NO: 12476 - DNA, 33 bp, homo sapiens
aagagtgggtttatcawtaaaggcaatggtgaa

SEQ ID NO: 12477 - DNA, 33 bp, homo sapiens
ataaatcaaactgatayggcctcttttgaatag

SEQ ID NO: 12478 - DNA, 33 bp, homo sapiens
tatatttggaataatayggaattgcaaaatggt

SEQ ID NO: 12479 - DNA, 33 bp, homo sapiens
catgcaggaacttgcartataaaatgcaaaacc

SEQ ID NO: 12480 - DNA, 33 bp, homo sapiens
acaaccaaggtcttagratggccaaataattta

SEQ ID NO: 12481 - DNA, 33 bp, homo sapiens
aaagaataatcgcagasagtggagaagcactca

SEQ ID NO: 12482 - DNA, 33 bp, homo sapiens
tactgaggttggaggamctttcactttctgctc

SEQ ID NO: 12483 - DNA, 33 bp, homo sapiens
acgtttctcgataacayatgcagcatggccttc

SEQ ID NO: 12484 - DNA, 33 bp, homo sapiens
actccgtctcaagaaarattctagcccccgtag

SEQ ID NO: 12485 - DNA, 33 bp, homo sapiens
aaaagaacttaaagtcmgaagaatggaaccatt

SEQ ID NO: 12486 - DNA, 33 bp, homo sapiens
ctgcttggcttaggcastccgtaacctgagagt

SEQ ID NO: 12487 - DNA, 33 bp, homo sapiens
tcaaattttacttgacraagtggcccaagtggt

SEQ ID NO: 12488 - DNA, 33 bp, homo sapiens
taagtgcttctgaacargagacagttgtgtcat

SEQ ID NO: 12489 - DNA, 33 bp, homo sapiens
tgcagatcagaaaatasgggatcagagaggttg

SEQ ID NO: 12490 - DNA, 33 bp, homo sapiens
actaggaccctctgagragctggaagaaatcac

SEQ ID NO: 12491 - DNA, 33 bp, homo sapiens
gaaggacattccaggaraaagtagagggaagtg

SEQ ID NO: 12492 - DNA, 33 bp, homo sapiens
ttcacctttgtagccayggaccccatcatcatg

SEQ ID NO: 12493 - DNA, 33 bp, homo sapiens
gaagttgtttctcagaytccaggttgttggttt

SEQ ID NO: 12494 - DNA, 33 bp, homo sapiens
ggtagtaagtacttagsagatactcaaagaggt

SEQ ID NO: 12495 - DNA, 33 bp, homo sapiens
cattactgagatgacayatttggagttgcttga

SEQ ID NO: 12496 - DNA, 33 bp, homo sapiens
attgggttctcaaggayattcttctggcctggg

SEQ ID NO: 12497 - DNA, 33 bp, homo sapiens
aattttctttcattacsagcatctaagcgtcct

SEQ ID NO: 12498 - DNA, 33 bp, homo sapiens
caccagttgcaatgcayggttctgttcttcttc

SEQ ID NO: 12499 - DNA, 33 bp, homo sapiens
cttgggacatggaggasaatctacaagcaggtc

SEQ ID NO: 12500 - DNA, 33 bp, homo sapiens
atttaaccgactcagayggaaaatatttggggg

SEQ ID NO: 12501 - DNA, 33 bp, homo sapiens
ggctggggccaacaaasggcaagcagaagtcaa

SEQ ID NO: 12502 - DNA, 33 bp, homo sapiens
aaacttctgcaatgcayatgtgttagtttataa

SEQ ID NO: 12503 - DNA, 33 bp, homo sapiens
aggagggcagaaaaagragctcaagtagaaatg

SEQ ID NO: 12504 - DNA, 33 bp, homo sapiens
gttgaatggaagaatayggtcacaaaagaagac

SEQ ID NO: 12505 - DNA, 33 bp, homo sapiens
attactctctccaaacrccaggctaagtactcc

SEQ ID NO: 12506 - DNA, 33 bp, homo sapiens
atcctgagtaacacaargcttggcacatagtag

SEQ ID NO: 12507 - DNA, 33 bp, homo sapiens
agcccaattttccttcyatgtaccaaggctccc

SEQ ID NO: 12508 - DNA, 33 bp, homo sapiens
tgccagacactgtgccragttcaggactccacc

SEQ ID NO: 12509 - DNA, 33 bp, homo sapiens
ggcctaggaactttccrgaagccccatccatag

SEQ ID NO: 12510 - DNA, 33 bp, homo sapiens
tcttctcctcgcatcargtgtaatatcaagacg

SEQ ID NO: 12511 - DNA, 33 bp, homo sapiens
ttgggaaagaagtgaayggagaagctagctcac

SEQ ID NO: 12512 - DNA, 33 bp, homo sapiens
cttgcctcaaatcacartaaactctggggtgca

SEQ ID NO: 12513 - DNA, 33 bp, homo sapiens
tctaccctcaacctgawgccatggtgagctcta

SEQ ID NO: 12514 - DNA, 33 bp, homo sapiens
tcagatttcatgcgaamctcaatcctctacttt

SEQ ID NO: 12515 - DNA, 33 bp, homo sapiens
ctcacttcatctctacyactgtccctaacatat

SEQ ID NO: 12516 - DNA, 33 bp, homo sapiens
gcatgggaactcccaaygtgtagcgaagttgga

SEQ ID NO: 12517 - DNA, 33 bp, homo sapiens
tctcatttagggaccayattgtgtgattctaat

SEQ ID NO: 12518 - DNA, 33 bp, homo sapiens
accacctgcatatacamtgataaaataaaagga

SEQ ID NO: 12519 - DNA, 33 bp, homo sapiens
tcattaaagactcttakgaacaactatatgcca

SEQ ID NO: 12520 - DNA, 33 bp, homo sapiens
ccattatgtaaatggartataggtgataggtgg

SEQ ID NO: 12521 - DNA, 33 bp, homo sapiens
tattttcttaagctcaygtgaaacattcaccaa

SEQ ID NO: 12522 - DNA, 33 bp, homo sapiens
catggttaaaaacttcyagccagggtgatactt

SEQ ID NO: 12523 - DNA, 33 bp, homo sapiens
attacagagttcagaaygtgcaccaggaggtca

SEQ ID NO: 12524 - DNA, 33 bp, homo sapiens
aggaaaaagtagatgaraaaagagacaacgagg

SEQ ID NO: 12525 - DNA, 33 bp, homo sapiens
acgttggttttcaaackgtgagtatagaaatca

SEQ ID NO: 12526 - DNA, 33 bp, homo sapiens
taaacctcatttttcarctctctctattcttag

SEQ ID NO: 12527 - DNA, 33 bp, homo sapiens
tcctctccagcaagtamaggttctgtctatgcc

SEQ ID NO: 12528 - DNA, 33 bp, homo sapiens
tcacggaaaatagacarcgtgtaagcccagcta

SEQ ID NO: 12529 - DNA, 33 bp, homo sapiens
ttctatccatttatcargtgagaaaacattctc

SEQ ID NO: 12530 - DNA, 33 bp, homo sapiens
tgtctggcaatcatcargcctagagaaacaggg

SEQ ID NO: 12531 - DNA, 33 bp, homo sapiens
ctgtgactttatagtgkatttctctattgggta

SEQ ID NO: 12532 - DNA, 33 bp, homo sapiens
tgcctcacatcaggagyagcataggaggttgac

SEQ ID NO: 12533 - DNA, 33 bp, homo sapiens
cctctctgaacaaaacyggagacatctaccagg

SEQ ID NO: 12534 - DNA, 33 bp, homo sapiens
gcagaaatacttgcacyataactgattccaaaa

SEQ ID NO: 12535 - DNA, 33 bp, homo sapiens
tgtcattggcttcccawcttattgcttcagtgt

SEQ ID NO: 12536 - DNA, 33 bp, homo sapiens
cagcaatatgaatgtayataacaccactgaact

SEQ ID NO: 12537 - DNA, 33 bp, homo sapiens
gaggggctataaaaccrggagaagaggtggtgg

SEQ ID NO: 12538 - DNA, 33 bp, homo sapiens
tatgtaaaatgtaaaakttggtgtttgacataa

SEQ ID NO: 12539 - DNA, 33 bp, homo sapiens
taggagagcatagtacygaggctctgataggga

SEQ ID NO: 12540 - DNA, 33 bp, homo sapiens
gcattcccaatggatcygaagactcgatggaag

SEQ ID NO: 12541 - DNA, 33 bp, homo sapiens
gtatgatggagctcagraagatgtaattcctcc

SEQ ID NO: 12542 - DNA, 33 bp, homo sapiens
gcttgttttctagcgakcactagcagacactta

SEQ ID NO: 12543 - DNA, 33 bp, homo sapiens
tcaccttgcatcaagcratcccagctcttcaaa

SEQ ID NO: 12544 - DNA, 33 bp, homo sapiens
cagcacaaggtcagccrcagacaagtgggcatt

SEQ ID NO: 12545 - DNA, 33 bp, homo sapiens
acttaacagtgaatagratttcaatcatctgga

SEQ ID NO: 12546 - DNA, 33 bp, homo sapiens
ggaggacctcatgatcrctaactggaggagatg

SEQ ID NO: 12547 - DNA, 33 bp, homo sapiens
gagccatcagataaacyaaatgtggcgtgtcac

SEQ ID NO: 12548 - DNA, 33 bp, homo sapiens
cctcttcatggtgaaawtagagggagtattgtg

SEQ ID NO: 12549 - DNA, 33 bp, homo sapiens
tatgccatcattcaagragtcccactgtgtgct

SEQ ID NO: 12550 - DNA, 33 bp, homo sapiens
aatattcttctcctccragctcattgtctagtg

SEQ ID NO: 12551 - DNA, 33 bp, homo sapiens
cagtggcagattgcccrggaagaattggaggca

SEQ ID NO: 12552 - DNA, 33 bp, homo sapiens
tgaatttgttgccgaaygccagatgttctggct

SEQ ID NO: 12553 - DNA, 33 bp, homo sapiens
ggtaatatatgcaaagwccttggtatagttctt

SEQ ID NO: 12554 - DNA, 33 bp, homo sapiens
taatatttataacaackctgctacaactcattt

SEQ ID NO: 12555 - DNA, 33 bp, homo sapiens
acagaaggaagtaggaygtgttgtgtgataatc

SEQ ID NO: 12556 - DNA, 33 bp, homo sapiens
gttgctcagagagagcrctgctaagtcccttga

SEQ ID NO: 12557 - DNA, 33 bp, homo sapiens
actcctgcctcagtgcragacgggtggtcccgg

SEQ ID NO: 12558 - DNA, 33 bp, homo sapiens
atggaaagcctgttacrcttcaagtaccccaca

SEQ ID NO: 12559 - DNA, 33 bp, homo sapiens
tcaatcttggcctatcrcaaataagccatgaga

SEQ ID NO: 12560 - DNA, 33 bp, homo sapiens
tcctttcttctgagccraccttattcccaggta

SEQ ID NO: 12561 - DNA, 33 bp, homo sapiens
gcagggcctgtaaacarcagccaaaagcctttt

SEQ ID NO: 12562 - DNA, 33 bp, homo sapiens
cctcccagatctgaccrgaccccgcagaaccta

SEQ ID NO: 12563 - DNA, 33 bp, homo sapiens
cccaggctccttgctasaaaaattgccaggtca

SEQ ID NO: 12564 - DNA, 33 bp, homo sapiens
aagaaaccgttttcaakgggagaattcgaggtc

SEQ ID NO: 12565 - DNA, 33 bp, homo sapiens
gaggctgggttagacarggtcctgtagttcctc

SEQ ID NO: 12566 - DNA, 33 bp, homo sapiens
attagtcatatgggaamacttccaggaggtgcc

SEQ ID NO: 12567 - DNA, 33 bp, homo sapiens
cctcagttttgttcctwagaagtctgcggccct

SEQ ID NO: 12568 - DNA, 33 bp, homo sapiens
ggtgaatcttaccaagragaaacctaaggcagt

SEQ ID NO: 12569 - DNA, 33 bp, homo sapiens
gagtcgtgtcaaagaarctcattgggctcttta

SEQ ID NO: 12570 - DNA, 33 bp, homo sapiens
gaagaaagaaggcaggrcatctccctccatggc

SEQ ID NO: 12571 - DNA, 33 bp, homo sapiens
atgtgtttagtcaaagwaatcagctttctcttc

SEQ ID NO: 12572 - DNA, 33 bp, homo sapiens
taacacatcaaggtcaytcagaagttaggatca

SEQ ID NO: 12573 - DNA, 33 bp, homo sapiens
agtactcttgatgtcasagaacaggagaaaact

SEQ ID NO: 12574 - DNA, 33 bp, homo sapiens
cattccagccatcagamagataggaggaatgaa

SEQ ID NO: 12575 - DNA, 33 bp, homo sapiens
tgaaatggcagggagayggggagccagagttaa

SEQ ID NO: 12576 - DNA, 33 bp, homo sapiens
cgcctctttctttccarctccgaaccagggaga

SEQ ID NO: 12577 - DNA, 33 bp, homo sapiens
gcacaaactcgctgtcrcaaagagagggaaaga

SEQ ID NO: 12578 - DNA, 33 bp, homo sapiens
cacaaccacaactttayacatggccagctgaat

SEQ ID NO: 12579 - DNA, 33 bp, homo sapiens
aaagattattgggccaygaggactgaatgttca

SEQ ID NO: 12580 - DNA, 33 bp, homo sapiens
ttgtagccagactccartatttgtttattgttt

SEQ ID NO: 12581 - DNA, 33 bp, homo sapiens
tgggaagacagacaacygggtgggaagcgaagg

SEQ ID NO: 12582 - DNA, 33 bp, homo sapiens
atgactggaaaaaggayctgcaagccggtctgc

SEQ ID NO: 12583 - DNA, 33 bp, homo sapiens
acaggtttcattgggartcacccatttaaagag

SEQ ID NO: 12584 - DNA, 33 bp, homo sapiens
catgtaaacggacttayacaatagatgtcattt

SEQ ID NO: 12585 - DNA, 33 bp, homo sapiens
atcctcgttcaaaaaasagtctactttataaat

SEQ ID NO: 12586 - DNA, 33 bp, homo sapiens
gttgcagctgtacaccraatagttagggaaggc

SEQ ID NO: 12587 - DNA, 33 bp, homo sapiens
gcacgacacctttggcmcgcaccaggaagccaa

SEQ ID NO: 12588 - DNA, 33 bp, homo sapiens
tcgtggaactcagtaamcccagaaagctgtgac

SEQ ID NO: 12589 - DNA, 33 bp, homo sapiens
gcaccctctgaaataaytctgcaaaccactggg

SEQ ID NO: 12590 - DNA, 33 bp, homo sapiens
aagcacagcccttggayatatgacattctaatt

SEQ ID NO: 12591 - DNA, 33 bp, homo sapiens
ctcctaaggaaaccaarctcacaatagtaatac

SEQ ID NO: 12592 - DNA, 33 bp, homo sapiens
ggtcatcctctttgacyaagcccacagcttctg

SEQ ID NO: 12593 - DNA, 33 bp, homo sapiens
agcaggcttgaacaaaygctcaggagccctggt

SEQ ID NO: 12594 - DNA, 33 bp, homo sapiens
tcacaactgcacattgyaactgctactaatatc

SEQ ID NO: 12595 - DNA, 33 bp, homo sapiens
ctaatcctggcatcgcyactgacttgcaatatg

SEQ ID NO: 12596 - DNA, 33 bp, homo sapiens
gacaagtggaagacaaratgttatgcagtaaac

SEQ ID NO: 12597 - DNA, 33 bp, homo sapiens
gtcctttaatcttgacmacaaacttgagcttgt

SEQ ID NO: 12598 - DNA, 33 bp, homo sapiens
ctggagtgaagcttgakgattttgaagatttct

SEQ ID NO: 12599 - DNA, 33 bp, homo sapiens
aatttgtagtgtttgcygattattgtgatgtaa

SEQ ID NO: 12600 - DNA, 33 bp, homo sapiens
ggatttgccattgcatraaaaagggaaggtaag

SEQ ID NO: 12601 - DNA, 33 bp, homo sapiens
gccccgtggaggtagasaccggaattaaattaa

SEQ ID NO: 12602 - DNA, 33 bp, homo sapiens
aaagcttctgagactgracaccttccttgatgc

SEQ ID NO: 12603 - DNA, 33 bp, homo sapiens
atcaatgcaaagcaacragaaacacacaaaaaa

SEQ ID NO: 12604 - DNA, 33 bp, homo sapiens
gcctgtcctagccagawaaaaatccattgagta

SEQ ID NO: 12605 - DNA, 33 bp, homo sapiens
gttaacaattgacacayagtttagcgtacgctg

SEQ ID NO: 12606 - DNA, 33 bp, homo sapiens
cttagaatcttagcacygtccaagagtgataaa

SEQ ID NO: 12607 - DNA, 33 bp, homo sapiens
ggaaaattatttcgaaygatctctcaggagttc

SEQ ID NO: 12608 - DNA, 33 bp, homo sapiens
ttaatgattaacacaasaaattaacttccattc

SEQ ID NO: 12609 - DNA, 33 bp, homo sapiens
tggtggatcccgcacaytgtagcagtaaagggg

SEQ ID NO: 12610 - DNA, 33 bp, homo sapiens
agcaatgcacaaaaggycaaatacaccatttaa

SEQ ID NO: 12611 - DNA, 33 bp, homo sapiens
cctgggtctatgtgcaygccgctatgctcgggt

SEQ ID NO: 12612 - DNA, 33 bp, homo sapiens
gtagaagagtacatacrctacgatacttcagga

SEQ ID NO: 12613 - DNA, 33 bp, homo sapiens
caggactttcttctcakcacatgcggtttcttg

SEQ ID NO: 12614 - DNA, 33 bp, homo sapiens
cgcaactggatgacaarctcttgtgtgttaaga

SEQ ID NO: 12615 - DNA, 33 bp, homo sapiens
ccttctctctggaaackagccgatgcataaaat

SEQ ID NO: 12616 - DNA, 33 bp, homo sapiens
gaatagggcagtgttcracattacatcttgaac

SEQ ID NO: 12617 - DNA, 33 bp, homo sapiens
agtgaatgatggtgagraataaactctgactca

SEQ ID NO: 12618 - DNA, 33 bp, homo sapiens
acattttctacgtgacygcttgccggaacctaa

SEQ ID NO: 12619 - DNA, 33 bp, homo sapiens
tcaagtctaggggtgasagaattttgtgaattt

SEQ ID NO: 12620 - DNA, 33 bp, homo sapiens
ttgcatagacataaaarggcagagaaagccaac

SEQ ID NO: 12621 - DNA, 33 bp, homo sapiens
ttcaaatgggtctcaartgtttgctagttcgta

SEQ ID NO: 12622 - DNA, 33 bp, homo sapiens
atcaaatctctgtcgaygcggctattttcaagc

SEQ ID NO: 12623 - DNA, 33 bp, homo sapiens
agcagacagaggaaccragcacttgcaaatgta

SEQ ID NO: 12624 - DNA, 33 bp, homo sapiens
ggaaagctaagttacakcttctcacttatcccc

SEQ ID NO: 12625 - DNA, 33 bp, homo sapiens
actgggatgaggttccrgcccaagttcctgagg

SEQ ID NO: 12626 - DNA, 33 bp, homo sapiens
tacacttatattccacraagagaacaactttta

SEQ ID NO: 12627 - DNA, 33 bp, homo sapiens
taactaactggccttcratggttcacttttccc

SEQ ID NO: 12628 - DNA, 33 bp, homo sapiens
ctactgccttctcagaygtgagctcttcatcac

SEQ ID NO: 12629 - DNA, 33 bp, homo sapiens
tttctgatctgcttggsaccctaatctctgcac

SEQ ID NO: 12630 - DNA, 33 bp, homo sapiens
tttctcatttgtaataygggatgaataaaaaca

SEQ ID NO: 12631 - DNA, 33 bp, homo sapiens
ttgtaaactccattgcraaacttctgtgcttga

SEQ ID NO: 12632 - DNA, 33 bp, homo sapiens
caaaaggcagaaaaacsatgcctccgagcctca

SEQ ID NO: 12633 - DNA, 33 bp, homo sapiens
caaaagcctgacctatraacatctttgtggaga

SEQ ID NO: 12634 - DNA, 33 bp, homo sapiens
actgttatgaggcagcygaagtggtcatcccag

SEQ ID NO: 12635 - DNA, 33 bp, homo sapiens
ccacatgctaagaatcrccagggctatgtttat

SEQ ID NO: 12636 - DNA, 33 bp, homo sapiens
gtctgggaatgggttgyatcaccagagctgaag

SEQ ID NO: 12637 - DNA, 33 bp, homo sapiens
ttgcctgacacagagasgtaacaggttgagtga

SEQ ID NO: 12638 - DNA, 33 bp, homo sapiens
ctacaggattttgttayacacctgagtccagtt

SEQ ID NO: 12639 - DNA, 33 bp, homo sapiens
agggtggtgtagtgtargaagtgctgtaaatga

SEQ ID NO: 12640 - DNA, 33 bp, homo sapiens
gtcagagaccttcagtraatacagtgctacccc

SEQ ID NO: 12641 - DNA, 33 bp, homo sapiens
gactccactacaaatcrccatggttgagcccca

SEQ ID NO: 12642 - DNA, 33 bp, homo sapiens
ggttggcctggttcacyacgttcccaatctgct

SEQ ID NO: 12643 - DNA, 33 bp, homo sapiens
cactgtgataaggaaarctgcttaaatgaaatt

SEQ ID NO: 12644 - DNA, 33 bp, homo sapiens
catcttctcagccaaayccaacaatccaccagc

SEQ ID NO: 12645 - DNA, 33 bp, homo sapiens
tagacatttgggatgcrcattgattctctaata

SEQ ID NO: 12646 - DNA, 33 bp, homo sapiens
attctccttttgcctcwatccctggaatgcttg

SEQ ID NO: 12647 - DNA, 33 bp, homo sapiens
acatgcctccatccacygaaggcagccctgcat

SEQ ID NO: 12648 - DNA, 33 bp, homo sapiens
taacatacaaaagagcrcctgacacattataaa

SEQ ID NO: 12649 - DNA, 33 bp, homo sapiens
taaaacacacaaagtasctaccttcagaaaatt

SEQ ID NO: 12650 - DNA, 33 bp, homo sapiens
gatgacagggctactaycagagctatttcttga

SEQ ID NO: 12651 - DNA, 33 bp, homo sapiens
attgttattgacaatcrgagtagcaataaggtt

SEQ ID NO: 12652 - DNA, 33 bp, homo sapiens
agacattttaatcttayggcagtgttactgaat

SEQ ID NO: 12653 - DNA, 33 bp, homo sapiens
ggctgctgtatggaaayggtttgatgcagaaac

SEQ ID NO: 12654 - DNA, 33 bp, homo sapiens
catcaggtttgggctayagcatttgtgaccaca

SEQ ID NO: 12655 - DNA, 33 bp, homo sapiens
atattctaaaatctacygcatgatcagacataa

SEQ ID NO: 12656 - DNA, 33 bp, homo sapiens
acataaggagatcaaayatgaaactgataactt

SEQ ID NO: 12657 - DNA, 33 bp, homo sapiens
ttccatctctacgacastcatggtcttatattt

SEQ ID NO: 12658 - DNA, 33 bp, homo sapiens
tatgtgagaactattawagggtgagtggtatag

SEQ ID NO: 12659 - DNA, 33 bp, homo sapiens
agcttgagagacatgayatttttatgtatagac

SEQ ID NO: 12660 - DNA, 33 bp, homo sapiens
ttacaattcttccagcyattttgaaatatacaa

SEQ ID NO: 12661 - DNA, 33 bp, homo sapiens
cgtaaaatgcatagaamcaatctgtatcccaac

SEQ ID NO: 12662 - DNA, 33 bp, homo sapiens
caatttaatttgcaaartaggctgacctcaaga

SEQ ID NO: 12663 - DNA, 33 bp, homo sapiens
cagaaacattctgttaygatagtataccaggaa

SEQ ID NO: 12664 - DNA, 33 bp, homo sapiens
tcaggccaagaagacaragccttaattttaatc

SEQ ID NO: 12665 - DNA, 33 bp, homo sapiens
taaatgtggttgaaaayggaagcaaaaataaaa

SEQ ID NO: 12666 - DNA, 33 bp, homo sapiens
gctggtgaaatttctcrgaaaactgactgctca

SEQ ID NO: 12667 - DNA, 33 bp, homo sapiens
tcattatactaattaaktggggccttttctgct

SEQ ID NO: 12668 - DNA, 33 bp, homo sapiens
ccagtggaagctgtccraggagatatattcaaa

SEQ ID NO: 12669 - DNA, 33 bp, homo sapiens
gaagagtcattcttaayatggtctaatatattt

SEQ ID NO: 12670 - DNA, 33 bp, homo sapiens
ttatcattattttcatyagctgaacagcacccc

SEQ ID NO: 12671 - DNA, 33 bp, homo sapiens
aaccattttattaagawtctgccacaggaaatt

SEQ ID NO: 12672 - DNA, 33 bp, homo sapiens
gttattgggcagaaacycttaagagaccatttc

SEQ ID NO: 12673 - DNA, 33 bp, homo sapiens
ataagtggttaagaaaygtggatatacatcact

SEQ ID NO: 12674 - DNA, 33 bp, homo sapiens
gcctaggtggttgttaygttaacttgaattgtg

SEQ ID NO: 12675 - DNA, 33 bp, homo sapiens
gcactaagcaaatcatraaagtggcatcagata

SEQ ID NO: 12676 - DNA, 33 bp, homo sapiens
tactgcttacctaaaawctagtccagggtctct

SEQ ID NO: 12677 - DNA, 33 bp, homo sapiens
tggcaactgtgctaagyagctttatgaatggaa

SEQ ID NO: 12678 - DNA, 33 bp, homo sapiens
aaaggaaatacagaacrggtagtgaaagaaggt

SEQ ID NO: 12679 - DNA, 33 bp, homo sapiens
atggaagcaggaattaygtctgttttttgctgt

SEQ ID NO: 12680 - DNA, 33 bp, homo sapiens
gattcggaattatcggycattcaaatacctcat

SEQ ID NO: 12681 - DNA, 33 bp, homo sapiens
atatcattattttttcrccagctataggttcta

SEQ ID NO: 12682 - DNA, 33 bp, homo sapiens
tcgagaatggagtctaygagccctggttggttg

SEQ ID NO: 12683 - DNA, 33 bp, homo sapiens
ttccccaactgggatcyagactcttggggcaaa

SEQ ID NO: 12684 - DNA, 33 bp, homo sapiens
gaataaaggaggttgaygtggtgaccttcagct

SEQ ID NO: 12685 - DNA, 33 bp, homo sapiens
aagaagacaaacagatraacggcggaatgacac

SEQ ID NO: 12686 - DNA, 33 bp, homo sapiens
aggactggtgtgagtaygatcagactgacattc

SEQ ID NO: 12687 - DNA, 33 bp, homo sapiens
cttttgaatcctctccycattattcagttcgaa

SEQ ID NO: 12688 - DNA, 33 bp, homo sapiens
tctggaagaattcaggkagacctggctgtgtgg

SEQ ID NO: 12689 - DNA, 33 bp, homo sapiens
tagctccccgcacatcrattcccttctgatgct

SEQ ID NO: 12690 - DNA, 33 bp, homo sapiens
caggatagatgtcgackccttcttgctcctcct

SEQ ID NO: 12691 - DNA, 33 bp, homo sapiens
actgcttgttgacaccrcagtacacacagtgcc

SEQ ID NO: 12692 - DNA, 33 bp, homo sapiens
ccatgatgagagaaagrcaatgaatcctgctat

SEQ ID NO: 12693 - DNA, 33 bp, homo sapiens
ccagacactggagatayattcatggagtattca

SEQ ID NO: 12694 - DNA, 33 bp, homo sapiens
cagtttttcagctggargataaataaaactact

SEQ ID NO: 12695 - DNA, 33 bp, homo sapiens
gccaacctagtgacaayagtgcgctttattccg

SEQ ID NO: 12696 - DNA, 33 bp, homo sapiens
ctctggttcttccttcyctacccaggtgacact

SEQ ID NO: 12697 - DNA, 33 bp, homo sapiens
cacatgaaaccttgtayatcaatcatgttcaca

SEQ ID NO: 12698 - DNA, 33 bp, homo sapiens
tgaagctggtcaccccygaggacgacgagctgg

SEQ ID NO: 12699 - DNA, 33 bp, homo sapiens
ttttcctaaattctgcraagatctagaacctgg

SEQ ID NO: 12700 - DNA, 33 bp, homo sapiens
gagtgatttcagaaaaytggaaagaagcaggct

SEQ ID NO: 12701 - DNA, 33 bp, homo sapiens
acagagggagaatcgaygctggagagcaaatga

SEQ ID NO: 12702 - DNA, 33 bp, homo sapiens
ggctccaatgatgacaytgtatgatccttgctt

SEQ ID NO: 12703 - DNA, 33 bp, homo sapiens
acttcacaaaatctggyatttgaagtgcattag

SEQ ID NO: 12704 - DNA, 33 bp, homo sapiens
gaatccatctatcactsactattacggttgagg

SEQ ID NO: 12705 - DNA, 33 bp, homo sapiens
gaaaatgaatcattcastcagggcaggagacga

SEQ ID NO: 12706 - DNA, 33 bp, homo sapiens
tcctagatgcagctgaytactgtctagaattgt

SEQ ID NO: 12707 - DNA, 33 bp, homo sapiens
tcaaaggagaatattaygcttagtatggaattt

SEQ ID NO: 12708 - DNA, 33 bp, homo sapiens
gcaggggaaaacagcasattggagctgcagtca

SEQ ID NO: 12709 - DNA, 33 bp, homo sapiens
cagtgcaattctgaaakccagttactccaatgt

SEQ ID NO: 12710 - DNA, 33 bp, homo sapiens
ttaacatgaaaacacayacaggagggggtgctc

SEQ ID NO: 12711 - DNA, 33 bp, homo sapiens
caaaaaaaacaaacatsaactgtgtatttcact

SEQ ID NO: 12712 - DNA, 33 bp, homo sapiens
ccacctatgggccacamctgcaggacatcttta

SEQ ID NO: 12713 - DNA, 33 bp, homo sapiens
gtagtgaggatgccacsgatttctgaatggttt

SEQ ID NO: 12714 - DNA, 33 bp, homo sapiens
aaaaagaggatctcacrgaaaagaggtcttaaa

SEQ ID NO: 12715 - DNA, 33 bp, homo sapiens
accaccctctaagccastgcagatctatgtgtg

SEQ ID NO: 12716 - DNA, 33 bp, homo sapiens
aagaccagcagctgtayattaagcactgaaatt

SEQ ID NO: 12717 - DNA, 33 bp, homo sapiens
cagtaattaagttttasgctcctcctgctaaga

SEQ ID NO: 12718 - DNA, 33 bp, homo sapiens
accaagggctcttcaaygagacagtgatataat

SEQ ID NO: 12719 - DNA, 33 bp, homo sapiens
tcaaaaataacacaatsaggcactggttgaaaa

SEQ ID NO: 12720 - DNA, 33 bp, homo sapiens
tgaatcttgccaagcaraggactgactgggtaa

SEQ ID NO: 12721 - DNA, 33 bp, homo sapiens
tatattgacattaagcygcactggggaaagtgg

SEQ ID NO: 12722 - DNA, 33 bp, homo sapiens
taagcctcaggttaaaygcctaggcagctgcag

SEQ ID NO: 12723 - DNA, 33 bp, homo sapiens
tggctccatcccaaaartcttcgggtggaggag

SEQ ID NO: 12724 - DNA, 33 bp, homo sapiens
tactacaaatgatctasagaacgcatctcaaag

SEQ ID NO: 12725 - DNA, 33 bp, homo sapiens
tccattatgaccaaaartaaatcagggaaggca

SEQ ID NO: 12726 - DNA, 33 bp, homo sapiens
gttatcgccacttcaarttcccatttattttgt

SEQ ID NO: 12727 - DNA, 33 bp, homo sapiens
aagtaaattctttgaastcaaaccttagggaat

SEQ ID NO: 12728 - DNA, 33 bp, homo sapiens
taactctgttggtgtasagtattccagtagaga

SEQ ID NO: 12729 - DNA, 33 bp, homo sapiens
agtgttttataagagarcaaaaatgagtctgtg

SEQ ID NO: 12730 - DNA, 33 bp, homo sapiens
ccatagacaaaaaaacrataagtacgtgagtga

SEQ ID NO: 12731 - DNA, 33 bp, homo sapiens
tttccctctactgtacsaaacttagaaagcaca

SEQ ID NO: 12732 - DNA, 33 bp, homo sapiens
aggcagttgaatgccaraaaggaactcccagcc

SEQ ID NO: 12733 - DNA, 33 bp, homo sapiens
tctgatgtgtcacaatmactcagtgtctctgag

SEQ ID NO: 12734 - DNA, 33 bp, homo sapiens
ttaggatatgaaatacrcttttttaagtaacaa

SEQ ID NO: 12735 - DNA, 33 bp, homo sapiens
ccctgtaatagatgctmataaacatttgggtaa

SEQ ID NO: 12736 - DNA, 33 bp, homo sapiens
ctctataaatttgtcakgcccaaaataaatgcg

SEQ ID NO: 12737 - DNA, 33 bp, homo sapiens
ctcactttctttctggragggacattacaacag

SEQ ID NO: 12738 - DNA, 33 bp, homo sapiens
tcagcccctagattcasctcctatccgtgtaat

SEQ ID NO: 12739 - DNA, 33 bp, homo sapiens
aaaataggacaaccaartgtacaataactctaa

SEQ ID NO: 12740 - DNA, 33 bp, homo sapiens
tactaaggtaagataakgcagctttggaaatgg

SEQ ID NO: 12741 - DNA, 33 bp, homo sapiens
gagctgacaggtagaamaatctggatgcaaatt

SEQ ID NO: 12742 - DNA, 33 bp, homo sapiens
gactttgaatgtgaagsactgcaaattaacaaa

SEQ ID NO: 12743 - DNA, 33 bp, homo sapiens
cgcacatttttttctaygagatccaccagtagc

SEQ ID NO: 12744 - DNA, 33 bp, homo sapiens
ctcagcaggattagtascttttagatgcatgtg

SEQ ID NO: 12745 - DNA, 33 bp, homo sapiens
agggaaaaaaaactccrgcagacaaaactgtaa

SEQ ID NO: 12746 - DNA, 33 bp, homo sapiens
ggtatttttttgtgaargtagtgataagaaaag

SEQ ID NO: 12747 - DNA, 33 bp, homo sapiens
ggacctacagtggttakaagtcatggtcatttt

SEQ ID NO: 12748 - DNA, 33 bp, homo sapiens
gaggagaagtggtccaktcagagacaaaaatgc

SEQ ID NO: 12749 - DNA, 33 bp, homo sapiens
aacatatttggaagacragaaaatgaacccaga

SEQ ID NO: 12750 - DNA, 33 bp, homo sapiens
caccacttcttgcatayaacagtgcaaatcaaa

SEQ ID NO: 12751 - DNA, 33 bp, homo sapiens
gatttagatgccaagamaagactctgaccatta

SEQ ID NO: 12752 - DNA, 33 bp, homo sapiens
acttggatccaagtgcyctgctcagttaacaaa

SEQ ID NO: 12753 - DNA, 33 bp, homo sapiens
tcatggatcactttacratgtttttcaaaattt

SEQ ID NO: 12754 - DNA, 33 bp, homo sapiens
cggtgagctccttggcrgcagagtatttcttca

SEQ ID NO: 12755 - DNA, 33 bp, homo sapiens
tcattgattctctatayatacgttgttgcattt

SEQ ID NO: 12756 - DNA, 33 bp, homo sapiens
tcatagcaattatcatsagcattatctaactaa

SEQ ID NO: 12757 - DNA, 33 bp, homo sapiens
tcagcacagatcattcycaagaatccaagcagg

SEQ ID NO: 12758 - DNA, 33 bp, homo sapiens
taaatcctcaaggttaycaaagagatactaaga

SEQ ID NO: 12759 - DNA, 33 bp, homo sapiens
cagcattaactccagamcctgtggaaggccagc

SEQ ID NO: 12760 - DNA, 33 bp, homo sapiens
ctcaggacctcaatccyctgtttggcctgtgtt

SEQ ID NO: 12761 - DNA, 33 bp, homo sapiens
acatctatatcctcaamccaaggagaaaaagga

SEQ ID NO: 12762 - DNA, 33 bp, homo sapiens
aaaaaaaagagctcacraatgtccctgctgttt

SEQ ID NO: 12763 - DNA, 33 bp, homo sapiens
aagacttacaggatcayagaatgtcaagattgg

SEQ ID NO: 12764 - DNA, 33 bp, homo sapiens
attttggaaaagttgastagacaaaaggtgcag

SEQ ID NO: 12765 - DNA, 33 bp, homo sapiens
aaaacaatccctggaakcaaatactagtagtat

SEQ ID NO: 12766 - DNA, 33 bp, homo sapiens
caggcttaagaatacaytagtaggtacagcagg

SEQ ID NO: 12767 - DNA, 33 bp, homo sapiens
aagatagaaagtgtcaygtcaaagataaaggga

SEQ ID NO: 12768 - DNA, 33 bp, homo sapiens
ttctgaagcaactaggycacagtagaaaaaagt

SEQ ID NO: 12769 - DNA, 33 bp, homo sapiens
agcttagctctaaccaraaagatttattatccc

SEQ ID NO: 12770 - DNA, 33 bp, homo sapiens
tctttcagttgaattayggtctttagctcaaat

SEQ ID NO: 12771 - DNA, 33 bp, homo sapiens
taaaatatcccaaatargcaaacctactgagac

SEQ ID NO: 12772 - DNA, 33 bp, homo sapiens
gtgttgacaaggcacaytggagacaacacaaca

SEQ ID NO: 12773 - DNA, 33 bp, homo sapiens
acatttctctagtgcamcaattcgaagaagtca

SEQ ID NO: 12774 - DNA, 33 bp, homo sapiens
taaaatagaagcctcasagatgggaaaacatgg

SEQ ID NO: 12775 - DNA, 33 bp, homo sapiens
cttctctaagctgaacragtgggaattccattg

SEQ ID NO: 12776 - DNA, 33 bp, homo sapiens
cttatgcatgtaatacwctataaagtcaggata

SEQ ID NO: 12777 - DNA, 33 bp, homo sapiens
atctagaacattgcacragctgaaagttctctg

SEQ ID NO: 12778 - DNA, 33 bp, homo sapiens
gaggaggagatacatcrcttctgcagggtacat

SEQ ID NO: 12779 - DNA, 33 bp, homo sapiens
gggaccaaagactatgraaagtgaacctggctg

SEQ ID NO: 12780 - DNA, 33 bp, homo sapiens
aaaaattgggtttgccsattcacagggttggca

SEQ ID NO: 12781 - DNA, 33 bp, homo sapiens
gcttcccttccagggcrcttttttagatgctgc

SEQ ID NO: 12782 - DNA, 33 bp, homo sapiens
cttctgcttcaaaacastcgcaaaatcatgaga

SEQ ID NO: 12783 - DNA, 33 bp, homo sapiens
atttcataggaatttayaggacccctaggagcc

SEQ ID NO: 12784 - DNA, 33 bp, homo sapiens
tgctaatctgggtatayatttcccctgcccaaa

SEQ ID NO: 12785 - DNA, 33 bp, homo sapiens
cccagatagatccgaaygaagacgcaactttca

SEQ ID NO: 12786 - DNA, 33 bp, homo sapiens
cgcccccactacaaagmattatctggttcccaa

SEQ ID NO: 12787 - DNA, 33 bp, homo sapiens
gagtaccaggaagtgaygatgtgactcggcatc

SEQ ID NO: 12788 - DNA, 33 bp, homo sapiens
tagggattttgatgtarataactcaagaccact

SEQ ID NO: 12789 - DNA, 33 bp, homo sapiens
ttggtgttccttcttamatcagaaacattgatg

SEQ ID NO: 12790 - DNA, 33 bp, homo sapiens
cacttcctggactacamgttttaggagcagctg

SEQ ID NO: 12791 - DNA, 33 bp, homo sapiens
atcttaacgaatcttgmaacagctctagataag

SEQ ID NO: 12792 - DNA, 33 bp, homo sapiens
catacaaatcaaagacsaggtgcatgggatctt

SEQ ID NO: 12793 - DNA, 33 bp, homo sapiens
gaaagcatcaagcaacratggccataatagaaa

SEQ ID NO: 12794 - DNA, 33 bp, homo sapiens
accaatgaccactatamcaatagtacccacaag

SEQ ID NO: 12795 - DNA, 33 bp, homo sapiens
cctggaggtctgatgarggataaggtctctacg

SEQ ID NO: 12796 - DNA, 33 bp, homo sapiens
aaaaagggaagaattaraataatcacctatgta

SEQ ID NO: 12797 - DNA, 33 bp, homo sapiens
acactctgcaagcttaycacctatctaggaaga

SEQ ID NO: 12798 - DNA, 33 bp, homo sapiens
ccagtatttctgtaaasacctattatttgtatt

SEQ ID NO: 12799 - DNA, 33 bp, homo sapiens
tatagacaattttgaamaatacccagaaacagc

SEQ ID NO: 12800 - DNA, 33 bp, homo sapiens
gggctagatgcagaaayatcagctgagaggtac

SEQ ID NO: 12801 - DNA, 33 bp, homo sapiens
taaagaatcacaaaaarggctgtctgtgttatg

SEQ ID NO: 12802 - DNA, 33 bp, homo sapiens
gaaacgatacaaacacyaagaaacctggataaa

SEQ ID NO: 12803 - DNA, 33 bp, homo sapiens
cagacttcaagtccaasctaccttaagcaaatt

SEQ ID NO: 12804 - DNA, 33 bp, homo sapiens
tctctctttcctcacayattttattgttgtaac

SEQ ID NO: 12805 - DNA, 33 bp, homo sapiens
cagcttcagccatcaamcctctctacctccacc

SEQ ID NO: 12806 - DNA, 33 bp, homo sapiens
ctgcggctgcccctaaraggacagattgttgct

SEQ ID NO: 12807 - DNA, 33 bp, homo sapiens
aaagcaattggtgagasgcagcatggaagtctg

SEQ ID NO: 12808 - DNA, 33 bp, homo sapiens
acagatagaaagtagcraaacgagttaatgggt

SEQ ID NO: 12809 - DNA, 33 bp, homo sapiens
cagttttccgctgccgyatttcccattgagata

SEQ ID NO: 12810 - DNA, 33 bp, homo sapiens
atgaactttgtcatccrctcacggactttgttc

SEQ ID NO: 12811 - DNA, 33 bp, homo sapiens
agctaatctgtggacaktggtgaagaaatctat

SEQ ID NO: 12812 - DNA, 33 bp, homo sapiens
gcagctcagttaatcartgaagaaatgcaagtg

SEQ ID NO: 12813 - DNA, 33 bp, homo sapiens
tcctgacttagaaagasaaagtgaacttccatc

SEQ ID NO: 12814 - DNA, 33 bp, homo sapiens
tggctgttgtataccaraagaataggtacatga

SEQ ID NO: 12815 - DNA, 33 bp, homo sapiens
aagaatgagcaaagccwctaatgaggtaggtgc

SEQ ID NO: 12816 - DNA, 33 bp, homo sapiens
cacaactagggaagaayattagcaatcacctgg

SEQ ID NO: 12817 - DNA, 33 bp, homo sapiens
aatgaccacaagggcartagggatagggtattc

SEQ ID NO: 12818 - DNA, 33 bp, homo sapiens
gtgtgtagtgggcttcrccatctagatttgtgt

SEQ ID NO: 12819 - DNA, 33 bp, homo sapiens
tcattgggagaacttcyaaaagtttctatgcca

SEQ ID NO: 12820 - DNA, 33 bp, homo sapiens
tgcttcttgttcagagwataaaaattggtgtct

SEQ ID NO: 12821 - DNA, 33 bp, homo sapiens
ggcaacaattaactggsagtttgtaggcttgtg

SEQ ID NO: 12822 - DNA, 33 bp, homo sapiens
aagatgatttccaagcwctgcagggcagggaga

SEQ ID NO: 12823 - DNA, 33 bp, homo sapiens
gaaagggtggacggaasaaggtggatgtggaaa

SEQ ID NO: 12824 - DNA, 33 bp, homo sapiens
aatccaccgccttttargggttcagttgttctg

SEQ ID NO: 12825 - DNA, 33 bp, homo sapiens
aatgtggctctaccccwattctaacccatctgt

SEQ ID NO: 12826 - DNA, 33 bp, homo sapiens
agacagaggagcgaaasaggggatacggacagg

SEQ ID NO: 12827 - DNA, 33 bp, homo sapiens
ctcattgcagaagacarattctatttccttact

SEQ ID NO: 12828 - DNA, 33 bp, homo sapiens
gaagggaaaggagaackgaagaaggaaacagac

SEQ ID NO: 12829 - DNA, 33 bp, homo sapiens
tgttcagtgtatggccyaacgcactttggggag

SEQ ID NO: 12830 - DNA, 33 bp, homo sapiens
tgaatattaaaagacartaagccagttgtgtgt

SEQ ID NO: 12831 - DNA, 33 bp, homo sapiens
tgtcacttccaatgcamagtaaatgtggaaaat

SEQ ID NO: 12832 - DNA, 33 bp, homo sapiens
tgccaaaagcaagcaamcctaagaccttagaaa

SEQ ID NO: 12833 - DNA, 33 bp, homo sapiens
gaccagtgtatccgaarcttgagtgtacagcag

SEQ ID NO: 12834 - DNA, 33 bp, homo sapiens
tctctgcaaataattargggttagcaactttaa

SEQ ID NO: 12835 - DNA, 33 bp, homo sapiens
atgtgacccaagaaaasacgtgctctaaaaggc

SEQ ID NO: 12836 - DNA, 33 bp, homo sapiens
cactaaggtgaggatasattgaattatccttcg

SEQ ID NO: 12837 - DNA, 33 bp, homo sapiens
ggccacctactaatagscagcatcaattcttta

SEQ ID NO: 12838 - DNA, 33 bp, homo sapiens
atttttcccccatagcmgctatcatagttttgg

SEQ ID NO: 12839 - DNA, 33 bp, homo sapiens
gaatgggtgtttgaaasgtaagacacagcacac

SEQ ID NO: 12840 - DNA, 33 bp, homo sapiens
agccaactttgattgcrcttttctaaggggagg

SEQ ID NO: 12841 - DNA, 33 bp, homo sapiens
gacagggcagctggacragtgaaagtgaacctg

SEQ ID NO: 12842 - DNA, 33 bp, homo sapiens
tattcatcttgatatgraaggactcaaaactga

SEQ ID NO: 12843 - DNA, 33 bp, homo sapiens
agcaagctggcaggaascctgacggtgtcgtct

SEQ ID NO: 12844 - DNA, 33 bp, homo sapiens
gattgcaatatagaaasatcatcatcctcttgc

SEQ ID NO: 12845 - DNA, 33 bp, homo sapiens
cagcgtggaactcatcsctcagcctgtgcctac

SEQ ID NO: 12846 - DNA, 33 bp, homo sapiens
ctcctgccgcagaacasatagtatggctgcgca

SEQ ID NO: 12847 - DNA, 33 bp, homo sapiens
agacgaggtttgcttcyagggcctgggtaaaga

SEQ ID NO: 12848 - DNA, 33 bp, homo sapiens
gggcaggaaaaccgcartaggaactcccaactt

SEQ ID NO: 12849 - DNA, 33 bp, homo sapiens
agtggcatggcccacayaggagtttgctgttgg

SEQ ID NO: 12850 - DNA, 33 bp, homo sapiens
atcaggaaggttcagcragggtctgttattaaa

SEQ ID NO: 12851 - DNA, 33 bp, homo sapiens
aaagtacctcacaaaasaagatggtcaatcgtt

SEQ ID NO: 12852 - DNA, 33 bp, homo sapiens
gtggtcaaaaataagayctgctttctgctttca

SEQ ID NO: 12853 - DNA, 33 bp, homo sapiens
ccaacattagagaatasaattggacatgagatt

SEQ ID NO: 12854 - DNA, 33 bp, homo sapiens
caggaaactgatgccaractttttctttgagag

SEQ ID NO: 12855 - DNA, 33 bp, homo sapiens
acagatgagaattttgyagagaagccatctaga

SEQ ID NO: 12856 - DNA, 33 bp, homo sapiens
ggtccagaagcccttcycaagactcttcctgtt

SEQ ID NO: 12857 - DNA, 33 bp, homo sapiens
gcttactctgcagtgaygataatttccacgaac

SEQ ID NO: 12858 - DNA, 33 bp, homo sapiens
ggtcacatttaaccctsagggacgtggtgtgat

SEQ ID NO: 12859 - DNA, 33 bp, homo sapiens
gagaacaagtgttgggratccattcaggaatcc

SEQ ID NO: 12860 - DNA, 33 bp, homo sapiens
taaccattgcacccacygacacctcaaagccaa

SEQ ID NO: 12861 - DNA, 33 bp, homo sapiens
gtgagaaatcagccaamgaggttgatcgagtgg

SEQ ID NO: 12862 - DNA, 33 bp, homo sapiens
catcacttctgcaatcsccactgtagcccggag

SEQ ID NO: 12863 - DNA, 33 bp, homo sapiens
ctgtcgctatttttccyatttttcagatgatga

SEQ ID NO: 12864 - DNA, 33 bp, homo sapiens
gcatcttcagggaagcrattgactgtcttataa

SEQ ID NO: 12865 - DNA, 33 bp, homo sapiens
tggagaaatgcctttasaagccggggaatgcca

SEQ ID NO: 12866 - DNA, 33 bp, homo sapiens
gctcccaagtcgaaaasaggttcatgtttggtt

SEQ ID NO: 12867 - DNA, 33 bp, homo sapiens
cacaggctgtggaccaygagttctgatttcagg

SEQ ID NO: 12868 - DNA, 33 bp, homo sapiens
tgtgctctacggctacrggttcagccctggttt

SEQ ID NO: 12869 - DNA, 33 bp, homo sapiens
caggtagcattgggaasagggaggcttttcacc

SEQ ID NO: 12870 - DNA, 33 bp, homo sapiens
catgccttgggagataygattgatagaagatgt

SEQ ID NO: 12871 - DNA, 33 bp, homo sapiens
catgaaatgggaaatgsagatatacattattga

SEQ ID NO: 12872 - DNA, 33 bp, homo sapiens
tagcaagtcacagaccrggcttcaaacccagaa

SEQ ID NO: 12873 - DNA, 33 bp, homo sapiens
ggagtcaggactgtcaratgcaatggattccat

SEQ ID NO: 12874 - DNA, 33 bp, homo sapiens
tgaagtgggaaatccasgttgctggagaagcca

SEQ ID NO: 12875 - DNA, 33 bp, homo sapiens
ggggttttccagctcayggagtgtttgtgccaa

SEQ ID NO: 12876 - DNA, 33 bp, homo sapiens
agcaagctttctggaaratcctcctcctttgag

SEQ ID NO: 12877 - DNA, 33 bp, homo sapiens
ccgtgtcttctttatcrctgatctcagaagaag

SEQ ID NO: 12878 - DNA, 33 bp, homo sapiens
actgggaagcttgaccrgccagtcggcgttggc

SEQ ID NO: 12879 - DNA, 33 bp, homo sapiens
aggcggggaacgctccracaagtggagagaaat

SEQ ID NO: 12880 - DNA, 33 bp, homo sapiens
agagcctgacccttgcygagaatagcctgggta

SEQ ID NO: 12881 - DNA, 33 bp, homo sapiens
ggaactggcactgttasagatggttggtgagaa

SEQ ID NO: 12882 - DNA, 33 bp, homo sapiens
tcaccagggatccgaawtcaccagggatctgga

SEQ ID NO: 12883 - DNA, 33 bp, homo sapiens
agaaagtgctaagcgaygtgagccggagcaatc

SEQ ID NO: 12884 - DNA, 33 bp, homo sapiens
gcaggcactgggatagkcactttctctttcttt

SEQ ID NO: 12885 - DNA, 33 bp, homo sapiens
cattaacagtgagtacrgattttttaaagctct

SEQ ID NO: 12886 - DNA, 33 bp, homo sapiens
tttcaatattggctgayggtgatctccctccag

SEQ ID NO: 12887 - DNA, 33 bp, homo sapiens
gagctttctgtaaaacrggataataatctcttc

SEQ ID NO: 12888 - DNA, 33 bp, homo sapiens
ccttgagtaaaatggtraagtacaggtcgcaga

SEQ ID NO: 12889 - DNA, 33 bp, homo sapiens
actgccaggaaaattckacctcttagagactca

SEQ ID NO: 12890 - DNA, 33 bp, homo sapiens
tagagtcacagaatgaygaagaagaaccaaacc

SEQ ID NO: 12891 - DNA, 33 bp, homo sapiens
tgggcacgtggttgtcyaaaagttgagacctaa

SEQ ID NO: 12892 - DNA, 33 bp, homo sapiens
attttcgcagaacactsagcagaccaagtgtca

SEQ ID NO: 12893 - DNA, 33 bp, homo sapiens
tcagctacttgtggggragcgatcactgacctg

SEQ ID NO: 12894 - DNA, 33 bp, homo sapiens
gcggccgtcgatgaagrccctgtttgtggacag

SEQ ID NO: 12895 - DNA, 33 bp, homo sapiens
agagggaggctgttaamagagcagatgacattc

SEQ ID NO: 12896 - DNA, 33 bp, homo sapiens
ggatccgagagccccayctgtgcgtctgccgca

SEQ ID NO: 12897 - DNA, 33 bp, homo sapiens
ctgcttgcaaaattacycaggtctggtggccat

SEQ ID NO: 12898 - DNA, 33 bp, homo sapiens
actcatctaaagtccaytatttagcagtatcac

SEQ ID NO: 12899 - DNA, 33 bp, homo sapiens
ctgttctctttgatgcyatctccacaatgggga

SEQ ID NO: 12900 - DNA, 33 bp, homo sapiens
gcccacaccacgtggcygagaagtcaactatta

SEQ ID NO: 12901 - DNA, 33 bp, homo sapiens
tattacagtaaaaccakaaatttgatgttggta

SEQ ID NO: 12902 - DNA, 33 bp, homo sapiens
atagagctttatttgawacctatttggcaggtc

SEQ ID NO: 12903 - DNA, 33 bp, homo sapiens
catgggagagcaccacrgattctgcaaagtggt

SEQ ID NO: 12904 - DNA, 33 bp, homo sapiens
ctttggccttaacaggmaaatccctgagagttt

SEQ ID NO: 12905 - DNA, 33 bp, homo sapiens
gccaagcctctccaaartctccggagctcttcc

SEQ ID NO: 12906 - DNA, 33 bp, homo sapiens
acgaggccttctgtgaygcttcaaggcaaagga

SEQ ID NO: 12907 - DNA, 33 bp, homo sapiens
ccttcagtaaaccccaragttgtgcttgtctgg

SEQ ID NO: 12908 - DNA, 33 bp, homo sapiens
tcaccaagcgctgctcratctcaacgatcctct

SEQ ID NO: 12909 - DNA, 33 bp, homo sapiens
taccagcgcaacactgkataaccaggagaaacg

SEQ ID NO: 12910 - DNA, 33 bp, homo sapiens
agctatgacttactgaygggagccattgaaaca

SEQ ID NO: 12911 - DNA, 33 bp, homo sapiens
tcgtacacatgcatackcatacttacacatacc

SEQ ID NO: 12912 - DNA, 33 bp, homo sapiens
gtacacggtttggctgkaagaatgcacacagaa

SEQ ID NO: 12913 - DNA, 33 bp, homo sapiens
ctgccctgggaggatcyaagcttccagtatcct

SEQ ID NO: 12914 - DNA, 33 bp, homo sapiens
aagtcatcatcagtctraaaaagaggcccattt

SEQ ID NO: 12915 - DNA, 33 bp, homo sapiens
ggcagagtagttgttaygtaatctcaggagagt

SEQ ID NO: 12916 - DNA, 33 bp, homo sapiens
gctgacaatgcaggcamgtcataggccgaattc

SEQ ID NO: 12917 - DNA, 33 bp, homo sapiens
gaatccgtttatatcayaccaatggcaggaaaa

SEQ ID NO: 12918 - DNA, 33 bp, homo sapiens
acacgggtgatcctaayggaagtaccaggacac

SEQ ID NO: 12919 - DNA, 33 bp, homo sapiens
ctagcacagtactgaargaataaagcaccttga

SEQ ID NO: 12920 - DNA, 33 bp, homo sapiens
tgcttgagttgtggaaraaaaagagctcattag

SEQ ID NO: 12921 - DNA, 33 bp, homo sapiens
gttgactttttctgccyatgagtctgaacacga

SEQ ID NO: 12922 - DNA, 33 bp, homo sapiens
ttgctttagaaagaaasatttttctcaggcact

SEQ ID NO: 12923 - DNA, 33 bp, homo sapiens
tctgtgcagagaactawgtatctccaagctgtt

SEQ ID NO: 12924 - DNA, 33 bp, homo sapiens
actccaccaactcgacrgaggcacctggtggtt

SEQ ID NO: 12925 - DNA, 33 bp, homo sapiens
ttagcagactattagayaggtcataagaaatta

SEQ ID NO: 12926 - DNA, 33 bp, homo sapiens
ataagatttaaatgcgwatgaactgtgatagaa

SEQ ID NO: 12927 - DNA, 33 bp, homo sapiens
cgtccatgttagtaaaygtagatccatggtata

SEQ ID NO: 12928 - DNA, 33 bp, homo sapiens
taggcaaataggaaaaytgctgtaaaagccaaa

SEQ ID NO: 12929 - DNA, 33 bp, homo sapiens
tagtagacagatgctamaaaaaaaacaaccatg

SEQ ID NO: 12930 - DNA, 33 bp, homo sapiens
aaacagaaagtcaacaygaatgggaagaaatgg

SEQ ID NO: 12931 - DNA, 33 bp, homo sapiens
ctcatcaatgggagackgatttaaaacattatg

SEQ ID NO: 12932 - DNA, 33 bp, homo sapiens
agggtgttggtggaaakttcttttccgtggcat

SEQ ID NO: 12933 - DNA, 33 bp, homo sapiens
tgtattcatggttcagyattaattttgtttatt

SEQ ID NO: 12934 - DNA, 33 bp, homo sapiens
ctgcctttctttcctcyatgttcgctggaacct

SEQ ID NO: 12935 - DNA, 33 bp, homo sapiens
acgctcagatcaggtartacaaagtgtatggag

SEQ ID NO: 12936 - DNA, 33 bp, homo sapiens
gtggtggaacttgagayattgcaatttgggctt

SEQ ID NO: 12937 - DNA, 33 bp, homo sapiens
gttttctcataacccawacgaaatgcttcctaa

SEQ ID NO: 12938 - DNA, 33 bp, homo sapiens
ttgctttatgaagaaaytacctcaagaagacat

SEQ ID NO: 12939 - DNA, 33 bp, homo sapiens
tgggatgaactcaaagscatctcaaaatacata

SEQ ID NO: 12940 - DNA, 33 bp, homo sapiens
ggagaggaagttagaawctatgacctagagcag

SEQ ID NO: 12941 - DNA, 33 bp, homo sapiens
atctattatcaaattawcatccaaccagagcat

SEQ ID NO: 12942 - DNA, 33 bp, homo sapiens
aataacaccaagaggcmgagatcactggggcca

SEQ ID NO: 12943 - DNA, 33 bp, homo sapiens
ataatcagaatcagaayagtggcttgttcttgg

SEQ ID NO: 12944 - DNA, 33 bp, homo sapiens
ctaagctacatgagtcmaaagattatgtttcaa

SEQ ID NO: 12945 - DNA, 33 bp, homo sapiens
ttgcagttcttcttcarcagtaagggggtcata

SEQ ID NO: 12946 - DNA, 33 bp, homo sapiens
cattggtcaaatggcargcaagtttacatcatt

SEQ ID NO: 12947 - DNA, 33 bp, homo sapiens
tcacccttcaatagagyagtttaagcatttact

SEQ ID NO: 12948 - DNA, 33 bp, homo sapiens
cttccctctacaatacygatattggtggcaaat

SEQ ID NO: 12949 - DNA, 33 bp, homo sapiens
ttccggagggagagaaycgctaaaataaaggcc

SEQ ID NO: 12950 - DNA, 33 bp, homo sapiens
cttcaaaaatcatacaytagctgggccttggga

SEQ ID NO: 12951 - DNA, 33 bp, homo sapiens
tggatttccttgtggakagccaaatctctgcca

SEQ ID NO: 12952 - DNA, 33 bp, homo sapiens
agatagtttctatgaayatgtgacttagctccc

SEQ ID NO: 12953 - DNA, 33 bp, homo sapiens
ctgaaggcaagaaaaaygtgggtgcatgaaccc

SEQ ID NO: 12954 - DNA, 33 bp, homo sapiens
atttcaagcactatgcraggttcaggatgcgta

SEQ ID NO: 12955 - DNA, 33 bp, homo sapiens
aggcttctggcacctcmaactttctgttagcta

SEQ ID NO: 12956 - DNA, 33 bp, homo sapiens
ctggacagcccttcaamcatgacgttcaatccc

SEQ ID NO: 12957 - DNA, 33 bp, homo sapiens
gaaggaatgcctaaaakttaccacagactgtac

SEQ ID NO: 12958 - DNA, 33 bp, homo sapiens
ttctcagatccaaaaakccccgtaaaatcccag

SEQ ID NO: 12959 - DNA, 33 bp, homo sapiens
gaaacagtcacttaaaytgtcaaaagaacagca

SEQ ID NO: 12960 - DNA, 33 bp, homo sapiens
catctgctacaggttaygctatccagccctcac

SEQ ID NO: 12961 - DNA, 33 bp, homo sapiens
aatctcaaaagaacaargaaaagtagtcattaa

SEQ ID NO: 12962 - DNA, 33 bp, homo sapiens
gtgggatcatttgccaraggacttgttgacatc

SEQ ID NO: 12963 - DNA, 33 bp, homo sapiens
accacctttgcctacayaccgcgctgctggtcc

SEQ ID NO: 12964 - DNA, 33 bp, homo sapiens
ggcacttgaaccgccgraggtagatgatctggg

SEQ ID NO: 12965 - DNA, 33 bp, homo sapiens
ctctgctatgtgtctgraactgttttaaacact

SEQ ID NO: 12966 - DNA, 33 bp, homo sapiens
agagacctcagggctcmacagacttttccaggc

SEQ ID NO: 12967 - DNA, 33 bp, homo sapiens
aggctgtgttcaaaacygcagcgtaactgagaa

SEQ ID NO: 12968 - DNA, 33 bp, homo sapiens
ctgaggcttcaattcaygtctgttgtcttaaac

SEQ ID NO: 12969 - DNA, 33 bp, homo sapiens
acgcaaagaactcaaaytagtctgaacccagat

SEQ ID NO: 12970 - DNA, 33 bp, homo sapiens
tatgtctcctacaaacragtgagaatgtacaaa

SEQ ID NO: 12971 - DNA, 33 bp, homo sapiens
aatattcattagccccygattaggcgcaagtgc

SEQ ID NO: 12972 - DNA, 33 bp, homo sapiens
gtgctctgcagggaackcagtggtcctcaagcc

SEQ ID NO: 12973 - DNA, 33 bp, homo sapiens
ttagtcattaagtggaragttattaagtatctg

SEQ ID NO: 12974 - DNA, 33 bp, homo sapiens
gtcacccagtttatggwatttctcttacagcag

SEQ ID NO: 12975 - DNA, 33 bp, homo sapiens
tacttttataggttaakagattgtgtattcatg

SEQ ID NO: 12976 - DNA, 33 bp, homo sapiens
gaaagtgtgtgtagagmaagcatattttgtaat

SEQ ID NO: 12977 - DNA, 33 bp, homo sapiens
ttaactcaggcctaccrcaatccctgaattgca

SEQ ID NO: 12978 - DNA, 33 bp, homo sapiens
cttctgggcaaggagcratttgctgacgtggac

SEQ ID NO: 12979 - DNA, 33 bp, homo sapiens
gaggagacaccatagayagaaagcaatgggtgc

SEQ ID NO: 12980 - DNA, 33 bp, homo sapiens
gattcagataaaggtgyataagatgactaggca

SEQ ID NO: 12981 - DNA, 33 bp, homo sapiens
gttacagaatcatacartatgggaaaaacagat

SEQ ID NO: 12982 - DNA, 33 bp, homo sapiens
gttgaaggtccagttcyacaacaaacaagctgg

SEQ ID NO: 12983 - DNA, 33 bp, homo sapiens
tcccatgacccactaartatggatcccaacact

SEQ ID NO: 12984 - DNA, 33 bp, homo sapiens
aggatcattcaattccrattccagggctttttc

SEQ ID NO: 12985 - DNA, 33 bp, homo sapiens
ggaggccctcttgaccrcctctggaaccagacg

SEQ ID NO: 12986 - DNA, 33 bp, homo sapiens
gtgcaagataaagtcayctgaatcagtacctgt

SEQ ID NO: 12987 - DNA, 33 bp, homo sapiens
attctctttgctgaaamcttcttatctttctgt

SEQ ID NO: 12988 - DNA, 33 bp, homo sapiens
cctggccgaaagtcggmaatatttagacacctc

SEQ ID NO: 12989 - DNA, 33 bp, homo sapiens
caaccaagcaggattcrgaacgtggctgctggg

SEQ ID NO: 12990 - DNA, 33 bp, homo sapiens
tttacgcaacattgtayctgtgagaatctattg

SEQ ID NO: 12991 - DNA, 33 bp, homo sapiens
aatctaaggcatccaamttattaagttttagta

SEQ ID NO: 12992 - DNA, 33 bp, homo sapiens
agatgcagcttattaaycttggttggaaacagc

SEQ ID NO: 12993 - DNA, 33 bp, homo sapiens
agagtctgacatgtagraggtacttaggttata

SEQ ID NO: 12994 - DNA, 33 bp, homo sapiens
aaaaaatgtgattcaarggagcaccccattagc

SEQ ID NO: 12995 - DNA, 33 bp, homo sapiens
cctaacctcttttgtayctctcttgaagctatc

SEQ ID NO: 12996 - DNA, 33 bp, homo sapiens
gggttgggtttgaggayctcgagtcaggcaaag

SEQ ID NO: 12997 - DNA, 33 bp, homo sapiens
tggtcctgcaacagacrccgccaggaggaagta

SEQ ID NO: 12998 - DNA, 33 bp, homo sapiens
tcatagccaagtacaayatatgccttgaagaat

SEQ ID NO: 12999 - DNA, 33 bp, homo sapiens
ttgaaacaggagaaaamgacataaaacctgttc

SEQ ID NO: 13000 - DNA, 33 bp, homo sapiens
gccctttgggcatctcrctaatctgaatcctct

SEQ ID NO: 13001 - DNA, 33 bp, homo sapiens
aacaataagttattccrgatacagcacagtttc

SEQ ID NO: 13002 - DNA, 33 bp, homo sapiens
tataacccaaatgagcrctggtaaagaagagca

SEQ ID NO: 13003 - DNA, 33 bp, homo sapiens
tgaccctctgtaacctsaatggcttccggttct

SEQ ID NO: 13004 - DNA, 33 bp, homo sapiens
cattttcatagcaagawatcacagcagaagctt

SEQ ID NO: 13005 - DNA, 33 bp, homo sapiens
gtgacagacatacaccrctagtgactctgcaga

SEQ ID NO: 13006 - DNA, 33 bp, homo sapiens
caggctgcgtttgaggyagctcattttcgctaa

SEQ ID NO: 13007 - DNA, 33 bp, homo sapiens
tttggcttttcatgaaygagcattttgagctct

SEQ ID NO: 13008 - DNA, 33 bp, homo sapiens
ttgaaacccaatttgamcagctgtgtctttagg

SEQ ID NO: 13009 - DNA, 33 bp, homo sapiens
tcaatgaagagactcaygtcaagttcctattgt

SEQ ID NO: 13010 - DNA, 33 bp, homo sapiens
attgtaaataacaaaartgggatctgaaggaag

SEQ ID NO: 13011 - DNA, 33 bp, homo sapiens
ttgccctgcctgtgggkacacactctttaagct

SEQ ID NO: 13012 - DNA, 33 bp, homo sapiens
gctctacctctaacccrcatgagcatcttatct

SEQ ID NO: 13013 - DNA, 33 bp, homo sapiens
ggtcttggactccaaakctaatattctttcttt

SEQ ID NO: 13014 - DNA, 33 bp, homo sapiens
atgcagcaggtactaargatataaatatgaaca

SEQ ID NO: 13015 - DNA, 33 bp, homo sapiens
atgcttctggccatccscaggattgatacctga

SEQ ID NO: 13016 - DNA, 33 bp, homo sapiens
gtgactttagctccccsataatttcatcagcct

SEQ ID NO: 13017 - DNA, 33 bp, homo sapiens
tatacacacacatagasacgcccttgcagaatt

SEQ ID NO: 13018 - DNA, 33 bp, homo sapiens
gtttgttttaaagctaygtcaggcttagcagag

SEQ ID NO: 13019 - DNA, 33 bp, homo sapiens
ggaaggaagggccacartgataaaactgctact

SEQ ID NO: 13020 - DNA, 33 bp, homo sapiens
aatccaaaagactaaaygatgcgtatattgttt

SEQ ID NO: 13021 - DNA, 33 bp, homo sapiens
ttttggtgcctagctcrcggagtttatgttctc

SEQ ID NO: 13022 - DNA, 33 bp, homo sapiens
gaacagcttaggactcmatagtttgaataattc

SEQ ID NO: 13023 - DNA, 33 bp, homo sapiens
cagtgggagcatgttcrcactcttggagtcttt

SEQ ID NO: 13024 - DNA, 33 bp, homo sapiens
tctgtgtggagaagggracgataaattacttat

SEQ ID NO: 13025 - DNA, 33 bp, homo sapiens
gggactgcagacactaygtcggcacaatgagat

SEQ ID NO: 13026 - DNA, 33 bp, homo sapiens
actgaaatatatgcaarttcaagttgttagagc

SEQ ID NO: 13027 - DNA, 33 bp, homo sapiens
actctcaaatgcagcarggcctccacaatagtc

SEQ ID NO: 13028 - DNA, 33 bp, homo sapiens
aacccgacacaatcaarataccattacttattt

SEQ ID NO: 13029 - DNA, 33 bp, homo sapiens
atcagattcaatttcasatcagcctgagtccca

SEQ ID NO: 13030 - DNA, 33 bp, homo sapiens
aaagatactaagatccraggaaagaataatcca

SEQ ID NO: 13031 - DNA, 33 bp, homo sapiens
taagtaacttgcattargctacacagctggtaa

SEQ ID NO: 13032 - DNA, 33 bp, homo sapiens
aagtagacccatgtgaygaagaagaagcccttg

SEQ ID NO: 13033 - DNA, 33 bp, homo sapiens
gctctaagccacatcarggaagtcaagtccact

SEQ ID NO: 13034 - DNA, 33 bp, homo sapiens
tcatcagaacccatgtraataaatgtcctagaa

SEQ ID NO: 13035 - DNA, 33 bp, homo sapiens
ctgggccagagctgccyggaggtctcctctccc

SEQ ID NO: 13036 - DNA, 33 bp, homo sapiens
gaactcctggattcaarcgatgtttctgcctca

SEQ ID NO: 13037 - DNA, 33 bp, homo sapiens
ctccttctttgagggargaggaattctagggaa

SEQ ID NO: 13038 - DNA, 33 bp, homo sapiens
tgaggggcatcaaagcsagaggcaacccgggga

SEQ ID NO: 13039 - DNA, 33 bp, homo sapiens
agagaggtccaacacamaaggttggaagtggga

SEQ ID NO: 13040 - DNA, 33 bp, homo sapiens
ctgcagggtttagctcyctcatttccttcaggt

SEQ ID NO: 13041 - DNA, 33 bp, homo sapiens
gatgctcatgtcagccrgaatggaagttaactt

SEQ ID NO: 13042 - DNA, 33 bp, homo sapiens
tggatgctaagtaccakgatgttgttaagctgc

SEQ ID NO: 13043 - DNA, 33 bp, homo sapiens
tcatttcctgtagatayataaggtacccagaag

SEQ ID NO: 13044 - DNA, 33 bp, homo sapiens
ggcttgaaaatatagcwgatgggttgataataa

SEQ ID NO: 13045 - DNA, 33 bp, homo sapiens
actccggctgcgttacygacctgcgagctgacg

SEQ ID NO: 13046 - DNA, 33 bp, homo sapiens
ttcctcatttgaaaaamagagctaagataggag

SEQ ID NO: 13047 - DNA, 33 bp, homo sapiens
cggctgcccacccttcracactattacccatcg

SEQ ID NO: 13048 - DNA, 33 bp, homo sapiens
tacctcaagtactcacyatgaccccatcaacag

SEQ ID NO: 13049 - DNA, 33 bp, homo sapiens
ttcattgcatgaggccyattgtagtaagaagag

SEQ ID NO: 13050 - DNA, 33 bp, homo sapiens
cttgctttgggacacckggatttgcttttataa

SEQ ID NO: 13051 - DNA, 33 bp, homo sapiens
attattgttgaaaatcrcttgatcacagatgta

SEQ ID NO: 13052 - DNA, 33 bp, homo sapiens
cactgttaaataggaaytgtttcaggaaagaaa

SEQ ID NO: 13053 - DNA, 33 bp, homo sapiens
agagattcgagttttgratagaggaagaatcaa

SEQ ID NO: 13054 - DNA, 33 bp, homo sapiens
tccagctcaaccagaayaagaaggtatgcactt

SEQ ID NO: 13055 - DNA, 33 bp, homo sapiens
gaccggtaatggctccraatgccaggctgtgct

SEQ ID NO: 13056 - DNA, 33 bp, homo sapiens
tgttgtttagtatcatyaggaactattttgaca

SEQ ID NO: 13057 - DNA, 33 bp, homo sapiens
actgttttccttccaakaacacaccacacctct

SEQ ID NO: 13058 - DNA, 33 bp, homo sapiens
gaaatgatatatgacaygcagcttcctttcctc

SEQ ID NO: 13059 - DNA, 33 bp, homo sapiens
agaatttgctgggggcraggagatggtcaagat

SEQ ID NO: 13060 - DNA, 33 bp, homo sapiens
tactgagcgagctttgragtgttagttaaattt

SEQ ID NO: 13061 - DNA, 33 bp, homo sapiens
ccagaggtaaaaactgragataagcccatacct

SEQ ID NO: 13062 - DNA, 33 bp, homo sapiens
gccatcacccaataaawaggattccatcttgtg

SEQ ID NO: 13063 - DNA, 33 bp, homo sapiens
caagtaggtgtacttgmatctagacttcatgac

SEQ ID NO: 13064 - DNA, 33 bp, homo sapiens
tttcagtggctttatcyagaatcgcactggtga

SEQ ID NO: 13065 - DNA, 33 bp, homo sapiens
ttctgctggaattatayctaggcattgaattcc

SEQ ID NO: 13066 - DNA, 33 bp, homo sapiens
caccatttcctccaggycatattatcagaactg

SEQ ID NO: 13067 - DNA, 33 bp, homo sapiens
ttgcagttagttttagraatcggccaccaccac

SEQ ID NO: 13068 - DNA, 33 bp, homo sapiens
cttagcttgctaatgayatgggaagaccactca

SEQ ID NO: 13069 - DNA, 33 bp, homo sapiens
aaaaacaaaataatccyaagcgatcatccttgg

SEQ ID NO: 13070 - DNA, 33 bp, homo sapiens
atgacttctgtggcacyccagggctcctgcttc

SEQ ID NO: 13071 - DNA, 33 bp, homo sapiens
ttgatgaagacaataaygccaacaatggaatcg

SEQ ID NO: 13072 - DNA, 33 bp, homo sapiens
tgaggaagctctagtgwagaaattcaggacgcg

SEQ ID NO: 13073 - DNA, 33 bp, homo sapiens
gccctggatcaggaaartctggcgggaaacctc

SEQ ID NO: 13074 - DNA, 33 bp, homo sapiens
ttttttggccctcctaraagcaatcatttgctt

SEQ ID NO: 13075 - DNA, 33 bp, homo sapiens
ccacaagtttccatcayccagcttcctgtccac

SEQ ID NO: 13076 - DNA, 33 bp, homo sapiens
aagtctttcttgccccraccaggtcctctagtc

SEQ ID NO: 13077 - DNA, 33 bp, homo sapiens
ccttttcactcccacasgttatcccatattgac

SEQ ID NO: 13078 - DNA, 33 bp, homo sapiens
gggacaaaaatgtgccwcttgaaactgagttta

SEQ ID NO: 13079 - DNA, 33 bp, homo sapiens
ctggtaacaagtttatsaaaagaacatccacac

SEQ ID NO: 13080 - DNA, 33 bp, homo sapiens
tctcttctgaaatcaayagtccccctagtagct

SEQ ID NO: 13081 - DNA, 33 bp, homo sapiens
atctttgtatttctaayccttctttcatatcct

SEQ ID NO: 13082 - DNA, 33 bp, homo sapiens
gatcagcctcatttaakaagtcaatctgcttta

SEQ ID NO: 13083 - DNA, 33 bp, homo sapiens
aggaaatagctgttgcrgaatctaaggaaaagc

SEQ ID NO: 13084 - DNA, 33 bp, homo sapiens
catcggtgaactttgartacggactgcacatta

SEQ ID NO: 13085 - DNA, 33 bp, homo sapiens
tcacctggtaaatgccwcccctcaatcctgcca

SEQ ID NO: 13086 - DNA, 33 bp, homo sapiens
ttattaagtctctcaawtaaaatgccagacatg

SEQ ID NO: 13087 - DNA, 33 bp, homo sapiens
caagctcctacagaaaygttcattcctaccgag

SEQ ID NO: 13088 - DNA, 33 bp, homo sapiens
caattaatgtgtacaamaccaagcctagttttg

SEQ ID NO: 13089 - DNA, 33 bp, homo sapiens
cccagagatagaaagarcctggctgctactact

SEQ ID NO: 13090 - DNA, 33 bp, homo sapiens
ccttgtagaaacaacarccttgagaggtaatta

SEQ ID NO: 13091 - DNA, 33 bp, homo sapiens
atccatgaaaagtatayaagcagctgatatttt

SEQ ID NO: 13092 - DNA, 33 bp, homo sapiens
tatgcttgagtaactayattccggggtctatat

SEQ ID NO: 13093 - DNA, 33 bp, homo sapiens
cctgcactcatgatacragtcaccaaatcctga

SEQ ID NO: 13094 - DNA, 33 bp, homo sapiens
cctagtgccaaaataaktcttcccaacacttca

SEQ ID NO: 13095 - DNA, 33 bp, homo sapiens
cagttctgtcaactcaygatttcatacctgttt

SEQ ID NO: 13096 - DNA, 33 bp, homo sapiens
gtggcattgtcaattayatttgaagatgcacat

SEQ ID NO: 13097 - DNA, 33 bp, homo sapiens
atgctgagttttataayctgggaccataaggaa

SEQ ID NO: 13098 - DNA, 33 bp, homo sapiens
ttaggaaagtcgctgcraactggtactataaat

SEQ ID NO: 13099 - DNA, 33 bp, homo sapiens
gatttcagtgctattcycatgacaccagtccat

SEQ ID NO: 13100 - DNA, 33 bp, homo sapiens
ggggaaattgaggatgsctaatgggtaacaaaa

SEQ ID NO: 13101 - DNA, 33 bp, homo sapiens
attcaagcacattacakgcattacatttattgt

SEQ ID NO: 13102 - DNA, 33 bp, homo sapiens
acataagcttaacccaygcaccagaagatggaa

SEQ ID NO: 13103 - DNA, 33 bp, homo sapiens
caaaaatggactaataygcagctttaccacaag

SEQ ID NO: 13104 - DNA, 33 bp, homo sapiens
actatatttttgtcaawgtcactacctcttgct

SEQ ID NO: 13105 - DNA, 33 bp, homo sapiens
ttcctcattccactaasaacattcatcttttta

SEQ ID NO: 13106 - DNA, 33 bp, homo sapiens
gggcatctttggagaarcaggacttgccctgga

SEQ ID NO: 13107 - DNA, 33 bp, homo sapiens
cactgtctgcctttatsaaattatttcgttatt

SEQ ID NO: 13108 - DNA, 33 bp, homo sapiens
aagttctacgtataagraagtgcattggactga

SEQ ID NO: 13109 - DNA, 33 bp, homo sapiens
aggtagcataccgtaarcaacaatccaaaaagt

SEQ ID NO: 13110 - DNA, 33 bp, homo sapiens
gaagttcaagccctacsctagacctactgaatt

SEQ ID NO: 13111 - DNA, 33 bp, homo sapiens
gatatcctaatgtccartgcaaaattaaaaata

SEQ ID NO: 13112 - DNA, 33 bp, homo sapiens
cttaaattcttccaaartccactctcaaattct

SEQ ID NO: 13113 - DNA, 33 bp, homo sapiens
tgtttttaatattttayctactgtcgctaacta

SEQ ID NO: 13114 - DNA, 33 bp, homo sapiens
ctgttctacctggctayagtccctagctagcca

SEQ ID NO: 13115 - DNA, 33 bp, homo sapiens
tctattttaaagtctcragtgaagtagtttgga

SEQ ID NO: 13116 - DNA, 33 bp, homo sapiens
ataaagatcacctgcaytgattaaatctagagg

SEQ ID NO: 13117 - DNA, 33 bp, homo sapiens
actctcatttctgtccrgaggatttctatcatt

SEQ ID NO: 13118 - DNA, 33 bp, homo sapiens
ggcctgaaaaatcaacrccccagagatcctgta

SEQ ID NO: 13119 - DNA, 33 bp, homo sapiens
agtttacatgccaggartaaaggcaagtcaaag

SEQ ID NO: 13120 - DNA, 33 bp, homo sapiens
tgcagatgtgtgcaagkctcttctagctgctgc

SEQ ID NO: 13121 - DNA, 33 bp, homo sapiens
attgcgtgtacccacckgagttagccacaacca

SEQ ID NO: 13122 - DNA, 33 bp, homo sapiens
aggactgaataattcaygaggaagaaaactagt

SEQ ID NO: 13123 - DNA, 33 bp, homo sapiens
atgagaaatgctaacarggactttcatgcattg

SEQ ID NO: 13124 - DNA, 33 bp, homo sapiens
tgatacttacgttcaawgtgatgtcctggatgg

SEQ ID NO: 13125 - DNA, 33 bp, homo sapiens
aacaaataatgacccamctctctttgacagaaa

SEQ ID NO: 13126 - DNA, 33 bp, homo sapiens
aaccgtgtgccaatatyacaaagaacgtacaca

SEQ ID NO: 13127 - DNA, 33 bp, homo sapiens
aatagaaagacacaaarttcagaaagctagggc

SEQ ID NO: 13128 - DNA, 33 bp, homo sapiens
tatctctggagaaagayactcaataaacattct

SEQ ID NO: 13129 - DNA, 33 bp, homo sapiens
tatgtttcaatacatcyccatgggttacatagc

SEQ ID NO: 13130 - DNA, 33 bp, homo sapiens
atgttctgaaaacagayaagtgttgtgtttaaa

SEQ ID NO: 13131 - DNA, 33 bp, homo sapiens
aaaacactgatatagcwcttagatttaacacct

SEQ ID NO: 13132 - DNA, 33 bp, homo sapiens
agctagtcacctataawggaaaccccatcagac

SEQ ID NO: 13133 - DNA, 33 bp, homo sapiens
tgtccaaaagactcagragtgatatatttagat

SEQ ID NO: 13134 - DNA, 33 bp, homo sapiens
atgaattcatctttcartccaaatgttaaacaa

SEQ ID NO: 13135 - DNA, 33 bp, homo sapiens
acatgaactggtaaacrctgaataagctctatg

SEQ ID NO: 13136 - DNA, 33 bp, homo sapiens
acaggaaattgtaaaartaatacagagaaattt

SEQ ID NO: 13137 - DNA, 33 bp, homo sapiens
tccagtaacatttttaygtgcaaataactgcaa

SEQ ID NO: 13138 - DNA, 33 bp, homo sapiens
aagctcaacaagttgayacagtgtagggttgaa

SEQ ID NO: 13139 - DNA, 33 bp, homo sapiens
ggtagaaaaagataccraaatgtcatggtgata

SEQ ID NO: 13140 - DNA, 33 bp, homo sapiens
gcaaggctccaaaaacraatagaaagcttggtt

SEQ ID NO: 13141 - DNA, 33 bp, homo sapiens
ctcaattcagatgttayactttcactgaaatga

SEQ ID NO: 13142 - DNA, 33 bp, homo sapiens
tgagggcagagttcacwagtttctttaaataat

SEQ ID NO: 13143 - DNA, 33 bp, homo sapiens
ctatttatatgaagccraatggaaaacataagc

SEQ ID NO: 13144 - DNA, 33 bp, homo sapiens
tccaccaatatttcaaytgccaaaggaggacca

SEQ ID NO: 13145 - DNA, 33 bp, homo sapiens
tttatgtattggctgaygtaccgaaagaaatca

SEQ ID NO: 13146 - DNA, 33 bp, homo sapiens
tggagagaaattatgcrcgcagagaaaaagatt

SEQ ID NO: 13147 - DNA, 33 bp, homo sapiens
catcaggcactataggrcagagatacttgaaac

SEQ ID NO: 13148 - DNA, 33 bp, homo sapiens
tttgagcaatattcccrgataatttgtgctgac

SEQ ID NO: 13149 - DNA, 33 bp, homo sapiens
gttgaagtaggctgtgraaaaggggtaagatgg

SEQ ID NO: 13150 - DNA, 33 bp, homo sapiens
cacctggtggcccacartctgaaaggcaggaca

SEQ ID NO: 13151 - DNA, 33 bp, homo sapiens
tgtatgagtctatctaygcaatgcttttagctt

SEQ ID NO: 13152 - DNA, 33 bp, homo sapiens
taaaattttgataaacrcagttatagcgaatat

SEQ ID NO: 13153 - DNA, 33 bp, homo sapiens
cccccgggtagtcagarcagaaatgcactgacc

SEQ ID NO: 13154 - DNA, 33 bp, homo sapiens
ccagcctcgccaccatraagtgaacaacagccc

SEQ ID NO: 13155 - DNA, 33 bp, homo sapiens
aacagacacatgaacarctaactcaaacataaa

SEQ ID NO: 13156 - DNA, 33 bp, homo sapiens
tactatctattacaacrcagctaaacaaaggat

SEQ ID NO: 13157 - DNA, 33 bp, homo sapiens
tgtaaactggcatatgrcaatatttgttaaatt

SEQ ID NO: 13158 - DNA, 33 bp, homo sapiens
aaagtagtgcagaatayagtgggatattaggtt

SEQ ID NO: 13159 - DNA, 33 bp, homo sapiens
tcacagggctaaagccrgacgatatgtctattg

SEQ ID NO: 13160 - DNA, 33 bp, homo sapiens
aataaatcaagaatgamaaaatcctgagattga

SEQ ID NO: 13161 - DNA, 33 bp, homo sapiens
gattatcttgtccttcrgaaatggagcaggaaa

SEQ ID NO: 13162 - DNA, 33 bp, homo sapiens
tgtacaatcccttccaygcaagggctaagccag

SEQ ID NO: 13163 - DNA, 33 bp, homo sapiens
taggtcaacttccacckaactcgttgtccagtt

SEQ ID NO: 13164 - DNA, 33 bp, homo sapiens
atcaaaactggcaaaayctaaagctaaaagaaa

SEQ ID NO: 13165 - DNA, 33 bp, homo sapiens
cagcccttgattttcarccttcagcttagagct

SEQ ID NO: 13166 - DNA, 33 bp, homo sapiens
aagtgccctgcagatayggtcagtcagcaatgg

SEQ ID NO: 13167 - DNA, 33 bp, homo sapiens
aggtagcttgttgatcyagttggcaggagcctc

SEQ ID NO: 13168 - DNA, 33 bp, homo sapiens
catctaatgataaatcrgacaggatcaaggtta

SEQ ID NO: 13169 - DNA, 33 bp, homo sapiens
tgcaccttcaagaagcraggagcaggaacctgg

SEQ ID NO: 13170 - DNA, 33 bp, homo sapiens
catgttctcaactgcaractttttttgatcacg

SEQ ID NO: 13171 - DNA, 33 bp, homo sapiens
acacttaactcacttcmatcttctaaatacgtg

SEQ ID NO: 13172 - DNA, 33 bp, homo sapiens
gtactggatataagtcscaggaaagtcggcctt

SEQ ID NO: 13173 - DNA, 33 bp, homo sapiens
tggctggatgatcaagycactaaggtcaaaggt

SEQ ID NO: 13174 - DNA, 33 bp, homo sapiens
attatgtggtcctaagrctgaaatgaggccacg

SEQ ID NO: 13175 - DNA, 33 bp, homo sapiens
gcggaagcttgcttgartaatgaaagataatca

SEQ ID NO: 13176 - DNA, 33 bp, homo sapiens
gcaaaaagcctagctayattgcgcccctgcttt

SEQ ID NO: 13177 - DNA, 33 bp, homo sapiens
tccagcacactcaatcsatgacattaaagttac

SEQ ID NO: 13178 - DNA, 33 bp, homo sapiens
gggcgtggtcagggaartaagtctctggaaccc

SEQ ID NO: 13179 - DNA, 33 bp, homo sapiens
gagcactcggtaaatcsccagtgactgacgcaa

SEQ ID NO: 13180 - DNA, 33 bp, homo sapiens
gctaacagactaaactsaataccaaactaataa

SEQ ID NO: 13181 - DNA, 33 bp, homo sapiens
acttcagtaaaagggasagtagtaggtcaattt

SEQ ID NO: 13182 - DNA, 33 bp, homo sapiens
atgggggaggataataygaatgaaggtctaggg

SEQ ID NO: 13183 - DNA, 33 bp, homo sapiens
tcaaccagtaaaatacsattatgctcaatagaa

SEQ ID NO: 13184 - DNA, 33 bp, homo sapiens
caagaatggatcgaccrattaatcaaaatttta

SEQ ID NO: 13185 - DNA, 33 bp, homo sapiens
aggagccagcaaagtayatctggcactatatct

SEQ ID NO: 13186 - DNA, 33 bp, homo sapiens
gcaaagttccaaagaargttgggttctctatca

SEQ ID NO: 13187 - DNA, 33 bp, homo sapiens
tcttttctgtgctttakgaaattgtattaatca

SEQ ID NO: 13188 - DNA, 33 bp, homo sapiens
ctagggaaggtggtcamatcactttatctttgg

SEQ ID NO: 13189 - DNA, 33 bp, homo sapiens
acaaggacccgcacacrgatacctcccagctcc

SEQ ID NO: 13190 - DNA, 33 bp, homo sapiens
ggtgggcctgtttccaratgtcttcccaaatta

SEQ ID NO: 13191 - DNA, 33 bp, homo sapiens
ttatggaaaactggcarcctttgaaagcatgtg

SEQ ID NO: 13192 - DNA, 33 bp, homo sapiens
cagaaggcatacctacrgagattctccagctgg

SEQ ID NO: 13193 - DNA, 33 bp, homo sapiens
tgtaaaaatgttttgcratatatacaatcatta

SEQ ID NO: 13194 - DNA, 33 bp, homo sapiens
aagattgcgatcatgtkaagtaaatagccgtcc

SEQ ID NO: 13195 - DNA, 33 bp, homo sapiens
atgtcattgatttgtarggtacacctagtaagt

SEQ ID NO: 13196 - DNA, 33 bp, homo sapiens
ttctctgaggtgacccraagaactattcagaga

SEQ ID NO: 13197 - DNA, 33 bp, homo sapiens
attccacattcgagcaragaaactatttggctc

SEQ ID NO: 13198 - DNA, 33 bp, homo sapiens
tgcatagacaggaaaaygggatggtcccatgtt

SEQ ID NO: 13199 - DNA, 33 bp, homo sapiens
acttcctgttctgacasgtgcttttaacacttc

SEQ ID NO: 13200 - DNA, 33 bp, homo sapiens
aggatggattccaatgwagctctgtaagagtgc

SEQ ID NO: 13201 - DNA, 33 bp, homo sapiens
gagggacagcaaacagyccatgtgggtacagta

SEQ ID NO: 13202 - DNA, 33 bp, homo sapiens
tgatgctagcaggaacyagatggtgtaaatggc

SEQ ID NO: 13203 - DNA, 33 bp, homo sapiens
caccctctgctgagatsagaaggaggcagagag

SEQ ID NO: 13204 - DNA, 33 bp, homo sapiens
ggcatctttaacagtayagaaatgtatgctaca

SEQ ID NO: 13205 - DNA, 33 bp, homo sapiens
gttcatgtgtacccatyatatagcttccactta

SEQ ID NO: 13206 - DNA, 33 bp, homo sapiens
cagtgctaacacttcayggttttcctggccagg

SEQ ID NO: 13207 - DNA, 33 bp, homo sapiens
tctcagttatgctaggmagaaaggagctcttgt

SEQ ID NO: 13208 - DNA, 33 bp, homo sapiens
gtcaggttctggtcacrctgtcattctggctgc

SEQ ID NO: 13209 - DNA, 33 bp, homo sapiens
agagagacagattagcrctggcacgtgtgagac

SEQ ID NO: 13210 - DNA, 33 bp, homo sapiens
aaatgtaaattctacamgtagcagggacctgat

SEQ ID NO: 13211 - DNA, 33 bp, homo sapiens
gattttgagtagcaaarcaatgctgtgtgtcgc

SEQ ID NO: 13212 - DNA, 33 bp, homo sapiens
gatgttcagctccgggmaatttacttaactttc

SEQ ID NO: 13213 - DNA, 33 bp, homo sapiens
acaaacttcatggaccrccaattctttgcacct

SEQ ID NO: 13214 - DNA, 33 bp, homo sapiens
atcacgggcaaacgggraggagctggccaccct

SEQ ID NO: 13215 - DNA, 33 bp, homo sapiens
ctttcctccgttcacaytgagctgtatttgaag

SEQ ID NO: 13216 - DNA, 33 bp, homo sapiens
caaagcaaagtcatagrcctaaggaaataagag

SEQ ID NO: 13217 - DNA, 33 bp, homo sapiens
tggtaaagaactggaaygaaatgtcctggtttg

SEQ ID NO: 13218 - DNA, 33 bp, homo sapiens
atccagtatggagttcycttattcttcagagct

SEQ ID NO: 13219 - DNA, 33 bp, homo sapiens
tccatttccaaaacagraatttcatgatacgta

SEQ ID NO: 13220 - DNA, 33 bp, homo sapiens
ttttgctttatatcacmaaagtgtgggcatgat

SEQ ID NO: 13221 - DNA, 33 bp, homo sapiens
taagtgtatggcaacakggaaaggtctgtgcct

SEQ ID NO: 13222 - DNA, 33 bp, homo sapiens
aaatggattacttttcratgtgcatttggggag

SEQ ID NO: 13223 - DNA, 33 bp, homo sapiens
ctatgagtttggaacaygaattatctatctgtg

SEQ ID NO: 13224 - DNA, 33 bp, homo sapiens
aggatgggaaagagtcraggttctttgcaagga

SEQ ID NO: 13225 - DNA, 33 bp, homo sapiens
tcctttaaagaaaaaarttgccaatatcttgta

SEQ ID NO: 13226 - DNA, 33 bp, homo sapiens
ctccatagatggcacaytctcgaaaagacattt

SEQ ID NO: 13227 - DNA, 33 bp, homo sapiens
actgacatcttgagaayattatggcttccaacc

SEQ ID NO: 13228 - DNA, 33 bp, homo sapiens
ttggtttatctttagcygagtgcctctcagttc

SEQ ID NO: 13229 - DNA, 33 bp, homo sapiens
atcagggggaatgatcraaatcgtggcatggtt

SEQ ID NO: 13230 - DNA, 33 bp, homo sapiens
aatgtacaggataaaayaggctatggagtcaga

SEQ ID NO: 13231 - DNA, 33 bp, homo sapiens
caaattgtcataagcartcaacgttttagtctg

SEQ ID NO: 13232 - DNA, 33 bp, homo sapiens
acatcaaggctaattaygtgcgaagcaattgag

SEQ ID NO: 13233 - DNA, 33 bp, homo sapiens
atgagaagtgggaataygaagattacaaagtga

SEQ ID NO: 13234 - DNA, 33 bp, homo sapiens
aaggtgaccatgtccarcgtcttgtctgatatg

SEQ ID NO: 13235 - DNA, 33 bp, homo sapiens
agagctaaaaacagaaycattcgacccaacaat

SEQ ID NO: 13236 - DNA, 33 bp, homo sapiens
agcacaaggagctaaasaaatagaagtccaata

SEQ ID NO: 13237 - DNA, 33 bp, homo sapiens
ctcagggctaactatayggatggttcctatgct

SEQ ID NO: 13238 - DNA, 33 bp, homo sapiens
aaccatggccagacaarttccagacattagaat

SEQ ID NO: 13239 - DNA, 33 bp, homo sapiens
atgcagaaagagtaaasatagcaggtgtgagac

SEQ ID NO: 13240 - DNA, 33 bp, homo sapiens
tcatgttcttggtgagyaatcttcaggcttgca

SEQ ID NO: 13241 - DNA, 33 bp, homo sapiens
aagagaccttaaaccaytatttgatcaccttaa

SEQ ID NO: 13242 - DNA, 33 bp, homo sapiens
agtaaatgaatgcatayggctttcgaatatcaa

SEQ ID NO: 13243 - DNA, 33 bp, homo sapiens
agcttggtaagtgtgargaaagcaaatcatttc

SEQ ID NO: 13244 - DNA, 33 bp, homo sapiens
tatgctggaaatagcaytcgagccagacgccct

SEQ ID NO: 13245 - DNA, 33 bp, homo sapiens
tgagatgacgttgacartgatggactctgagca

SEQ ID NO: 13246 - DNA, 33 bp, homo sapiens
gttctatgcgagctccrattgcctttctcagca

SEQ ID NO: 13247 - DNA, 33 bp, homo sapiens
ccctaaccactaaccayactgaaagtgagagcc

SEQ ID NO: 13248 - DNA, 33 bp, homo sapiens
ccaagacgtcagctgaraagattgtgtgcacct

SEQ ID NO: 13249 - DNA, 33 bp, homo sapiens
gactaaagaaagctgcyccaggacccctcacgg

SEQ ID NO: 13250 - DNA, 33 bp, homo sapiens
ttattgtatctattaaytgggctcataatgttt

SEQ ID NO: 13251 - DNA, 33 bp, homo sapiens
gcccacagcaaaacagyctggaaaatacaagcc

SEQ ID NO: 13252 - DNA, 33 bp, homo sapiens
aagccagagaccttaastagtattttcagtctc

SEQ ID NO: 13253 - DNA, 33 bp, homo sapiens
ggtgtctttctttaccmaaatgataggatttaa

SEQ ID NO: 13254 - DNA, 33 bp, homo sapiens
aaaggggctgctcggaygcttgaaggccatgct

SEQ ID NO: 13255 - DNA, 33 bp, homo sapiens
cagcctggatggcaaarcgagactccgtttcaa

SEQ ID NO: 13256 - DNA, 33 bp, homo sapiens
tgcagcaagagggaaaraagtcagatctcctcc

SEQ ID NO: 13257 - DNA, 33 bp, homo sapiens
cagaaaaacttacacargtacatcaggtgacat

SEQ ID NO: 13258 - DNA, 33 bp, homo sapiens
acactgcatcctcagartaacacacaaaatgtg

SEQ ID NO: 13259 - DNA, 33 bp, homo sapiens
atgagttcagtcattayggaaagccgcatggca

SEQ ID NO: 13260 - DNA, 33 bp, homo sapiens
caattggtaattgactmaatccctggcccttcc

SEQ ID NO: 13261 - DNA, 33 bp, homo sapiens
ctagccacacccttgcrcaaatacactcatgaa

SEQ ID NO: 13262 - DNA, 33 bp, homo sapiens
aggtcatgaagatgtaygcctgggctttcttct

SEQ ID NO: 13263 - DNA, 33 bp, homo sapiens
tctgcctgttatctaamcgccgcctcccagcca

SEQ ID NO: 13264 - DNA, 33 bp, homo sapiens
aaccagtagcagccccratggcaccagattaac

SEQ ID NO: 13265 - DNA, 33 bp, homo sapiens
ggcaatgacagtgctcyactcacctggtacctg

SEQ ID NO: 13266 - DNA, 33 bp, homo sapiens
gccatcaaatatgtacrcggcatctgttctgta

SEQ ID NO: 13267 - DNA, 33 bp, homo sapiens
gtgtctggtaaagaaaygcaacttgaagagaat

SEQ ID NO: 13268 - DNA, 33 bp, homo sapiens
ctaccgacataacttaygatccgtttgagaatc

SEQ ID NO: 13269 - DNA, 33 bp, homo sapiens
gagctagcaggcataarccccgtcactgccgtt

SEQ ID NO: 13270 - DNA, 33 bp, homo sapiens
ttgggcccttacagctyacaaagtaaagataac

SEQ ID NO: 13271 - DNA, 33 bp, homo sapiens
taggggctagaaaccaygtactgtgaggaaggg

SEQ ID NO: 13272 - DNA, 33 bp, homo sapiens
aggttgcttcttccccrcagacagatggctgtc

SEQ ID NO: 13273 - DNA, 33 bp, homo sapiens
gcttcatgatgatggtkaagtggaatataattt

SEQ ID NO: 13274 - DNA, 33 bp, homo sapiens
gctgcaaggaagagggracttgtcagcccaaag

SEQ ID NO: 13275 - DNA, 33 bp, homo sapiens
atgaagctaccacacarattacctgtagaatcc

SEQ ID NO: 13276 - DNA, 33 bp, homo sapiens
atcgtttaagtttgagratgttatttggatttc

SEQ ID NO: 13277 - DNA, 33 bp, homo sapiens
gtgaactttgaacctgmaagagatgatttagag

SEQ ID NO: 13278 - DNA, 33 bp, homo sapiens
tccagcaccgctttacrattaaaattctcagca

SEQ ID NO: 13279 - DNA, 33 bp, homo sapiens
aatcaggcatgaaaaaratcaataaaactcacc

SEQ ID NO: 13280 - DNA, 33 bp, homo sapiens
tacatatttgaagtgayggatatactaattaga

SEQ ID NO: 13281 - DNA, 33 bp, homo sapiens
tagtgctatactgtacyctgcaatactcaggat

SEQ ID NO: 13282 - DNA, 33 bp, homo sapiens
tttattactgaaaacayctgggttgaagaaact

SEQ ID NO: 13283 - DNA, 33 bp, homo sapiens
tctcttgtcattcttaytaaatagttggtgtct

SEQ ID NO: 13284 - DNA, 33 bp, homo sapiens
ccaggctggaaaaaaasgttcttcagaaactca

SEQ ID NO: 13285 - DNA, 33 bp, homo sapiens
tggcctcgaacccttawgctcaagcgagcctcc

SEQ ID NO: 13286 - DNA, 33 bp, homo sapiens
gggcccagtctgtctaycttttagctcagtgct

SEQ ID NO: 13287 - DNA, 33 bp, homo sapiens
ttttctctttatccackgcctatttttaccttg

SEQ ID NO: 13288 - DNA, 33 bp, homo sapiens
attagcaaaaatttgaracaagataggagaatt

SEQ ID NO: 13289 - DNA, 33 bp, homo sapiens
gcaagcaggatagagaraatggttatgaggagg

SEQ ID NO: 13290 - DNA, 33 bp, homo sapiens
tggctgttacagtgaayattaaagacttaaaat

SEQ ID NO: 13291 - DNA, 33 bp, homo sapiens
ccatcagaccaagaaamgggctctggcccaacc

SEQ ID NO: 13292 - DNA, 33 bp, homo sapiens
atgcaggaagcaataasatgtggcactattgtc

SEQ ID NO: 13293 - DNA, 33 bp, homo sapiens
aatgttaattgctctckaatgtcatcagatctt

SEQ ID NO: 13294 - DNA, 33 bp, homo sapiens
ataaagaaggcctaaasaaatgcaaaggaatat

SEQ ID NO: 13295 - DNA, 33 bp, homo sapiens
agccagtttccgtgaaraagcattagtatcacc

SEQ ID NO: 13296 - DNA, 33 bp, homo sapiens
ctgtacaagacgaaatraggctttcttcaaagg

SEQ ID NO: 13297 - DNA, 33 bp, homo sapiens
aattttacaaaattgastcaaagcttgtatttt

SEQ ID NO: 13298 - DNA, 33 bp, homo sapiens
gaagcccctcagactayagcagaaattctacaa

SEQ ID NO: 13299 - DNA, 33 bp, homo sapiens
ggatgtggaataacgcwcaaaaccttttagaaa

SEQ ID NO: 13300 - DNA, 33 bp, homo sapiens
gagcagcattcctggartcacttaaaaacgttt

SEQ ID NO: 13301 - DNA, 33 bp, homo sapiens
taatagaaaagagaagrcaatgccacaaaaaag

SEQ ID NO: 13302 - DNA, 33 bp, homo sapiens
ggaagaatgtcttgatsactgcctccagggtaa

SEQ ID NO: 13303 - DNA, 33 bp, homo sapiens
ggtcagtgctaattcayggttttggaggtttgc

SEQ ID NO: 13304 - DNA, 33 bp, homo sapiens
cctttcaaatgtacacraaacagagagaattgt

SEQ ID NO: 13305 - DNA, 33 bp, homo sapiens
gaaaccaacattggtamcacactattaacaaaa

SEQ ID NO: 13306 - DNA, 33 bp, homo sapiens
agtaaaaactatggcastatgacctgttgttgc

SEQ ID NO: 13307 - DNA, 33 bp, homo sapiens
gtttgttattcagtcasattgttgtattgtctc

SEQ ID NO: 13308 - DNA, 33 bp, homo sapiens
ggagaccggaaagggcmagatgcttcagagctt

SEQ ID NO: 13309 - DNA, 33 bp, homo sapiens
actgtgaaatgtgactraatgatatcaggaggc

SEQ ID NO: 13310 - DNA, 33 bp, homo sapiens
gatacctcatcaccccygatacattattatgta

SEQ ID NO: 13311 - DNA, 33 bp, homo sapiens
tgctgccaaaatgacawacaacattaaatgaca

SEQ ID NO: 13312 - DNA, 33 bp, homo sapiens
catcccttcaagtcaamataatgtttatggtat

SEQ ID NO: 13313 - DNA, 33 bp, homo sapiens
ggacaataaagaccaastgaagacgaaggtgga

SEQ ID NO: 13314 - DNA, 33 bp, homo sapiens
aactggtggttctgaayactggagttgaatttc

SEQ ID NO: 13315 - DNA, 33 bp, homo sapiens
ttgtttgagagtggcarctgagaaagcatttgg

SEQ ID NO: 13316 - DNA, 33 bp, homo sapiens
ttctcttccctagaaakcctcaggtggacaaat

SEQ ID NO: 13317 - DNA, 33 bp, homo sapiens
tccccaatcacatgacractgcacattctctca

SEQ ID NO: 13318 - DNA, 33 bp, homo sapiens
aagttcagcttattaasatgtaagacacagctc

SEQ ID NO: 13319 - DNA, 33 bp, homo sapiens
acttagagcaattcctraaggtaagtggaaagg

SEQ ID NO: 13320 - DNA, 33 bp, homo sapiens
tttcagctaaaatgcartcacttaaaagtccag

SEQ ID NO: 13321 - DNA, 33 bp, homo sapiens
gcaccttctcagggaayctgctcggccctgcta

SEQ ID NO: 13322 - DNA, 33 bp, homo sapiens
gtgtggtgagtcagcaragacttgagtcaccat

SEQ ID NO: 13323 - DNA, 33 bp, homo sapiens
ttaatgaagatgcggarggacagttcacagcac

SEQ ID NO: 13324 - DNA, 33 bp, homo sapiens
tcaatagaaaggaaaargtccagtcatccagtt

SEQ ID NO: 13325 - DNA, 33 bp, homo sapiens
gtggaacacagaattaygtcattctccataggt

SEQ ID NO: 13326 - DNA, 33 bp, homo sapiens
agaggctagtcactgamggcacatttctgatca

SEQ ID NO: 13327 - DNA, 33 bp, homo sapiens
agtgaatacataatcaraaacgatggccagggt

SEQ ID NO: 13328 - DNA, 33 bp, homo sapiens
caagcagaggcaccgayggcctttgttctggtc

SEQ ID NO: 13329 - DNA, 33 bp, homo sapiens
aggacttaggatgtgaratgggatctgactggt

SEQ ID NO: 13330 - DNA, 33 bp, homo sapiens
ctctaaatataagggaygaagccgtgaacgtgg

SEQ ID NO: 13331 - DNA, 33 bp, homo sapiens
tttacattttggtgacrggatccatttgaataa

SEQ ID NO: 13332 - DNA, 33 bp, homo sapiens
tcctgaataagggagcygaacagtcaggggtgt

SEQ ID NO: 13333 - DNA, 33 bp, homo sapiens
tatttattagtaaaaaytcagttgcaggtgaca

SEQ ID NO: 13334 - DNA, 33 bp, homo sapiens
ttattctatctcaaagmctcaagacttggacta

SEQ ID NO: 13335 - DNA, 33 bp, homo sapiens
aaagatgtagacctcakggtagctggcttcttc

SEQ ID NO: 13336 - DNA, 33 bp, homo sapiens
aatctgtaactttcccwactacacagcagctag

SEQ ID NO: 13337 - DNA, 33 bp, homo sapiens
gtggtggaggttgttaygtcatctagctgctgt

SEQ ID NO: 13338 - DNA, 33 bp, homo sapiens
ccatcgctttccttaawatagatatcatgaaaa

SEQ ID NO: 13339 - DNA, 33 bp, homo sapiens
catttctaataagcagraagtcaactgtaacat

SEQ ID NO: 13340 - DNA, 33 bp, homo sapiens
ataatgttaacttaaartatgtcacaaagatct

SEQ ID NO: 13341 - DNA, 33 bp, homo sapiens
ggaatattcagaatcastactcgcagagcagaa

SEQ ID NO: 13342 - DNA, 33 bp, homo sapiens
tgttttcagccctccawtgcttgatgtttcctg

SEQ ID NO: 13343 - DNA, 33 bp, homo sapiens
aaatctctgtttaaaaygctagttcttacagac

SEQ ID NO: 13344 - DNA, 33 bp, homo sapiens
tcatcaccatcttatgyagctgtcacatcacaa

SEQ ID NO: 13345 - DNA, 33 bp, homo sapiens
gagagcatccttatcasaagtccgggctctgga

SEQ ID NO: 13346 - DNA, 33 bp, homo sapiens
ctttcatgtcactgaayacaaaatgaggctgca

SEQ ID NO: 13347 - DNA, 33 bp, homo sapiens
aaaagaaaaaaaatccycctgcacagatggggg

SEQ ID NO: 13348 - DNA, 33 bp, homo sapiens
atgtgagtttctgaggrcacagtctggcttgtt

SEQ ID NO: 13349 - DNA, 33 bp, homo sapiens
gggttctaatagataakctacctgatcttggac

SEQ ID NO: 13350 - DNA, 33 bp, homo sapiens
gaaatgagacatcagaycgtgggaattacaggg

SEQ ID NO: 13351 - DNA, 33 bp, homo sapiens
gcatgctctttttctgmagttctcaggtactcc

SEQ ID NO: 13352 - DNA, 33 bp, homo sapiens
ttttagagaatgatacrctggttcaagcctcgg

SEQ ID NO: 13353 - DNA, 33 bp, homo sapiens
ttcatctgattgaatcyatcaaatacaaagtca

SEQ ID NO: 13354 - DNA, 33 bp, homo sapiens
tgttcattttaactcayacttttgcttcagagt

SEQ ID NO: 13355 - DNA, 33 bp, homo sapiens
gttgattgatccctcawatataatggacagtag

SEQ ID NO: 13356 - DNA, 33 bp, homo sapiens
caccctgactcaagtckactcgtgtaggcacta

SEQ ID NO: 13357 - DNA, 33 bp, homo sapiens
ttcttagacaaactacwgaattttcctctctct

SEQ ID NO: 13358 - DNA, 33 bp, homo sapiens
tgcctgtcagtgagagwcctaagctggcaaatg

SEQ ID NO: 13359 - DNA, 33 bp, homo sapiens
cttgcagagggggaaaygtctggaagcagatac

SEQ ID NO: 13360 - DNA, 33 bp, homo sapiens
aaataaaagtcaaacayggcatagtagatttta

SEQ ID NO: 13361 - DNA, 33 bp, homo sapiens
tgtcatttctcctaaastagaggtcgttcaaat

SEQ ID NO: 13362 - DNA, 33 bp, homo sapiens
ctactgtctaaactccycagtaattgcagagta

SEQ ID NO: 13363 - DNA, 33 bp, homo sapiens
cataataaaaacattcsccaaagcaggctagtt

SEQ ID NO: 13364 - DNA, 33 bp, homo sapiens
tcttgacaactccaccrcgtccataacctcatg

SEQ ID NO: 13365 - DNA, 33 bp, homo sapiens
acataaagtatgtagaygaaatgtagtccaaat

SEQ ID NO: 13366 - DNA, 33 bp, homo sapiens
gagaacagaagcttcargagaagaaaatggccc

SEQ ID NO: 13367 - DNA, 33 bp, homo sapiens
aaattggcttgataccratgaaaatggcgacca

SEQ ID NO: 13368 - DNA, 33 bp, homo sapiens
tggggaggtcagatgaygagaggctttaggttt

SEQ ID NO: 13369 - DNA, 33 bp, homo sapiens
ctctggtctcccacaawcctgagctgcctccag

SEQ ID NO: 13370 - DNA, 33 bp, homo sapiens
gtttacttcagcctaamtggtataaaatcgtta

SEQ ID NO: 13371 - DNA, 33 bp, homo sapiens
tgtctccaattcaagayggtgtccgaagaacta

SEQ ID NO: 13372 - DNA, 33 bp, homo sapiens
aaatgtatcatttgaargaaacaaaaataacaa

SEQ ID NO: 13373 - DNA, 33 bp, homo sapiens
atgccttggttcgggckcttcctgagactctca

SEQ ID NO: 13374 - DNA, 33 bp, homo sapiens
tgtaatgacttgccaartgggacctgcccaggt

SEQ ID NO: 13375 - DNA, 33 bp, homo sapiens
acagtgttgtgacttayctgatgttacaatatc

SEQ ID NO: 13376 - DNA, 33 bp, homo sapiens
agcacggtgcaaaattyaactggataaactaca

SEQ ID NO: 13377 - DNA, 33 bp, homo sapiens
aggaacttttttgggcrgcaaactctgactttt

SEQ ID NO: 13378 - DNA, 33 bp, homo sapiens
gcgtctcaataggtacrgacgctataaaagttc

SEQ ID NO: 13379 - DNA, 33 bp, homo sapiens
gagaaaaaggaaaaacmatcaatggctgtgtaa

SEQ ID NO: 13380 - DNA, 33 bp, homo sapiens
ccaaaactggtacttaygtgaactgttgtcctt

SEQ ID NO: 13381 - DNA, 33 bp, homo sapiens
ggattttggcatttcawgttgctttacaaatgt

SEQ ID NO: 13382 - DNA, 33 bp, homo sapiens
atggcagaaacttgggmattgaacaggaagact

SEQ ID NO: 13383 - DNA, 33 bp, homo sapiens
gaggaaagcagcgggamccaggtggcgcctccc

SEQ ID NO: 13384 - DNA, 33 bp, homo sapiens
gcactgttcaggtgtamaatcggctttcacata

SEQ ID NO: 13385 - DNA, 33 bp, homo sapiens
tcaccacagatgggccraactattatttgtagg

SEQ ID NO: 13386 - DNA, 33 bp, homo sapiens
taatttgccaagagagyagattttagctgggca

SEQ ID NO: 13387 - DNA, 33 bp, homo sapiens
agctggatcattcagaygagagcctttggggga

SEQ ID NO: 13388 - DNA, 33 bp, homo sapiens
aaccatgtaggagtcamcacattcatttcatgt

SEQ ID NO: 13389 - DNA, 33 bp, homo sapiens
actcaaaacacaatgamaggaagatgcataagg

SEQ ID NO: 13390 - DNA, 33 bp, homo sapiens
gtctccaacttcctaamcaccagttactaataa

SEQ ID NO: 13391 - DNA, 33 bp, homo sapiens
cctatcagaggcccccyacctgttgcagaaaac

SEQ ID NO: 13392 - DNA, 33 bp, homo sapiens
cagccttgtgaaaatasagggaaggacattcta

SEQ ID NO: 13393 - DNA, 33 bp, homo sapiens
ttacagcactactttayggagtgatccacttcc

SEQ ID NO: 13394 - DNA, 33 bp, homo sapiens
agaagcagctcatttayagcaaaaagtcctggg

SEQ ID NO: 13395 - DNA, 33 bp, homo sapiens
tattccaaaccaaagcygccatatttagctgtg

SEQ ID NO: 13396 - DNA, 33 bp, homo sapiens
tacggaggagcttaaasaaatagcgtgattata

SEQ ID NO: 13397 - DNA, 33 bp, homo sapiens
atttacctattttttcyacctagatttgtaaac

SEQ ID NO: 13398 - DNA, 33 bp, homo sapiens
acaaaaaccagaagagwaacattgcctatggaa

SEQ ID NO: 13399 - DNA, 33 bp, homo sapiens
caaatgtaaccagctaygtgcgggtgtctggat

SEQ ID NO: 13400 - DNA, 33 bp, homo sapiens
ctatgagaatccagaartggaagagaagactag

SEQ ID NO: 13401 - DNA, 33 bp, homo sapiens
aggaccacaaagaagaratatagagcttttaat

SEQ ID NO: 13402 - DNA, 33 bp, homo sapiens
tcttcttctttttgtarcatattccctctcctt

SEQ ID NO: 13403 - DNA, 33 bp, homo sapiens
gttgaggctgggtgagsaccttatgcaggaggt

SEQ ID NO: 13404 - DNA, 33 bp, homo sapiens
ggaagttttgtattcaytcctttagatttgaca

SEQ ID NO: 13405 - DNA, 33 bp, homo sapiens
gaagcccatcactcccrctgtaaggaaacttta

SEQ ID NO: 13406 - DNA, 33 bp, homo sapiens
cactaactagactacaraaaaaggacgcttgtt

SEQ ID NO: 13407 - DNA, 33 bp, homo sapiens
aagggtttctgagctaygcagtctattgtccct

SEQ ID NO: 13408 - DNA, 33 bp, homo sapiens
actcttttctctacacmcaaattttaacatgga

SEQ ID NO: 13409 - DNA, 33 bp, homo sapiens
cacattactgaaatacraaacaattgaatttat

SEQ ID NO: 13410 - DNA, 33 bp, homo sapiens
ccctaaatcctttcaascacattgatctgtgat

SEQ ID NO: 13411 - DNA, 33 bp, homo sapiens
aaacactctttgtcaamtacttaaattgcagcc

SEQ ID NO: 13412 - DNA, 33 bp, homo sapiens
cccttaagtaactcgcrcacgcgggacctgttc

SEQ ID NO: 13413 - DNA, 33 bp, homo sapiens
ctttcaggctttcctayactaccaatttttctt

SEQ ID NO: 13414 - DNA, 33 bp, homo sapiens
gaccatggaaataagarcaatgcttaggagaca

SEQ ID NO: 13415 - DNA, 33 bp, homo sapiens
gaaattcatataaaggwccaagttagaataata

SEQ ID NO: 13416 - DNA, 33 bp, homo sapiens
ttgttttaaaagctaawcatctgaagtctagac

SEQ ID NO: 13417 - DNA, 33 bp, homo sapiens
acacaagatctgtgccrcttcaatacagacaag

SEQ ID NO: 13418 - DNA, 33 bp, homo sapiens
tgaaaggaaaacatacwattctgcttggttctt

SEQ ID NO: 13419 - DNA, 33 bp, homo sapiens
cctatcaacattctacyccttgctattgctaaa

SEQ ID NO: 13420 - DNA, 33 bp, homo sapiens
attttggatggaatcarcaacaaattagacata

SEQ ID NO: 13421 - DNA, 33 bp, homo sapiens
caaatataatatgatcwatggtgaagcaactag

SEQ ID NO: 13422 - DNA, 33 bp, homo sapiens
ctatatttcattttacyactttccctacagagt

SEQ ID NO: 13423 - DNA, 33 bp, homo sapiens
ccttattggtaagtctraattggtaagtctagt

SEQ ID NO: 13424 - DNA, 33 bp, homo sapiens
ttagaaccaatgagtamaaatatcatgagtgta

SEQ ID NO: 13425 - DNA, 33 bp, homo sapiens
aggctgtagagcaaagkctgggttttcttgaag

SEQ ID NO: 13426 - DNA, 33 bp, homo sapiens
taggaaaaaccaaaacsaacacattgtggactc

SEQ ID NO: 13427 - DNA, 33 bp, homo sapiens
tttattgcctaatagaragcagagaaaagtcaa

SEQ ID NO: 13428 - DNA, 33 bp, homo sapiens
aatcttggaaactgtgragaaaaagtaagttct

SEQ ID NO: 13429 - DNA, 33 bp, homo sapiens
tgttccggggtggatcrctaatatatgcttgac

SEQ ID NO: 13430 - DNA, 33 bp, homo sapiens
tgactgcgatataaaakttgtgcacttgatcgt

SEQ ID NO: 13431 - DNA, 33 bp, homo sapiens
atttctgttcattaaakgtagagatggagaaga

SEQ ID NO: 13432 - DNA, 33 bp, homo sapiens
tctaataattttgtgargtaattgatctattgc

SEQ ID NO: 13433 - DNA, 33 bp, homo sapiens
aagtactggtttgagargactgaattggtgccc

SEQ ID NO: 13434 - DNA, 33 bp, homo sapiens
tttgaaagttaaaagckgaggaagccgggagac

SEQ ID NO: 13435 - DNA, 33 bp, homo sapiens
tcaagggcaagtccagwcctgtagctgctgggg

SEQ ID NO: 13436 - DNA, 33 bp, homo sapiens
gcttaaagcaacaacartatagtactgatccaa

SEQ ID NO: 13437 - DNA, 33 bp, homo sapiens
gagaaagtattgcaaargatagccgttacagtc

SEQ ID NO: 13438 - DNA, 33 bp, homo sapiens
agagtgtgctgagaaayaccaatttgctgcaaa

SEQ ID NO: 13439 - DNA, 33 bp, homo sapiens
atgtattagcaaaaackggaggaagatgtgtgg

SEQ ID NO: 13440 - DNA, 33 bp, homo sapiens
aacaacaaagacagaaygggttcaaaggcaagg

SEQ ID NO: 13441 - DNA, 33 bp, homo sapiens
agtctgcctcaagaaakaagtctgggaaggaaa

SEQ ID NO: 13442 - DNA, 33 bp, homo sapiens
tcaattttgaatacaasaatgccaattgaagtt

SEQ ID NO: 13443 - DNA, 33 bp, homo sapiens
gtgactctttttcacamtgtcgtggtctcaggg

SEQ ID NO: 13444 - DNA, 33 bp, homo sapiens
gcaaaactgccctcaaracaatgaccagagttg

SEQ ID NO: 13445 - DNA, 33 bp, homo sapiens
aacaacaatttatgcamtctgctgtccataaat

SEQ ID NO: 13446 - DNA, 33 bp, homo sapiens
aaattagctttaacacrccgatgaatcaatgga

SEQ ID NO: 13447 - DNA, 33 bp, homo sapiens
ctcaagttacctatacrgcatttgttttggaat

SEQ ID NO: 13448 - DNA, 33 bp, homo sapiens
atgctataaatttcaaygtaggcactgttttca

SEQ ID NO: 13449 - DNA, 33 bp, homo sapiens
tgttcccaatggctagrctacatggatctggga

SEQ ID NO: 13450 - DNA, 33 bp, homo sapiens
gagagcctcagttcaasggacctacattacaga

SEQ ID NO: 13451 - DNA, 33 bp, homo sapiens
gatttttatgcactccyatgctaccttgcatgc

SEQ ID NO: 13452 - DNA, 33 bp, homo sapiens
actccttccaaattcaktcactgctataccagt

SEQ ID NO: 13453 - DNA, 33 bp, homo sapiens
ataaccctatatgatgkcacaagatgcaaaagc

SEQ ID NO: 13454 - DNA, 33 bp, homo sapiens
ttctgagggaaaaagcraactgattttgatact

SEQ ID NO: 13455 - DNA, 33 bp, homo sapiens
aggaatttcaaaaactraaatgcagggataaaa

SEQ ID NO: 13456 - DNA, 33 bp, homo sapiens
gtgctgatttctgagarggggagaagataaatg

SEQ ID NO: 13457 - DNA, 33 bp, homo sapiens
aaatgacaaagcccaaragaacagaggatcaaa

SEQ ID NO: 13458 - DNA, 33 bp, homo sapiens
tgtcataactaagaaarcagagctaattgaaac

SEQ ID NO: 13459 - DNA, 33 bp, homo sapiens
gccagtctacactgccraagtgtttcacttagc

SEQ ID NO: 13460 - DNA, 33 bp, homo sapiens
cagcacagactgtgtakgttttcaggagatttc

SEQ ID NO: 13461 - DNA, 33 bp, homo sapiens
tctcctcagggcaccarcttttctcagtacccc

SEQ ID NO: 13462 - DNA, 33 bp, homo sapiens
acactgacgttttgcasataagaatactgttgg

SEQ ID NO: 13463 - DNA, 33 bp, homo sapiens
ggaacttttaaacaagsagatggttagataagt

SEQ ID NO: 13464 - DNA, 33 bp, homo sapiens
gtctgccaggggagaasagaacacacccggaga

SEQ ID NO: 13465 - DNA, 33 bp, homo sapiens
gtctaggcctccaggcratcattttcactccct

SEQ ID NO: 13466 - DNA, 33 bp, homo sapiens
ctgaaggaagaacaaasaggcctccagtcctgc

SEQ ID NO: 13467 - DNA, 33 bp, homo sapiens
ctgctcttccacgttakcccttagcccagcccc

SEQ ID NO: 13468 - DNA, 33 bp, homo sapiens
cagtatttgtggaaccyataagagagtcacttg

SEQ ID NO: 13469 - DNA, 33 bp, homo sapiens
tcaaatgaagctcaagwatgtatatgtggacac

SEQ ID NO: 13470 - DNA, 33 bp, homo sapiens
atctgagtgacaagtayatgggtgttttattac

SEQ ID NO: 13471 - DNA, 33 bp, homo sapiens
tttcagagtcagcagasacattaacagctggtg

SEQ ID NO: 13472 - DNA, 33 bp, homo sapiens
atttggaattggaaagycctgaatttcagtctt

SEQ ID NO: 13473 - DNA, 33 bp, homo sapiens
cagagaataaccagaamaatctgctacctttgc

SEQ ID NO: 13474 - DNA, 33 bp, homo sapiens
tatttctcagaactaayagaaatgccagttttt

SEQ ID NO: 13475 - DNA, 33 bp, homo sapiens
cgtccagttcttctgastagccaagtgccttaa

SEQ ID NO: 13476 - DNA, 33 bp, homo sapiens
gaagaccagagagaaasaaatgatgaactgagg

SEQ ID NO: 13477 - DNA, 33 bp, homo sapiens
gttcaaaagcagctctwacattgtttctggact

SEQ ID NO: 13478 - DNA, 33 bp, homo sapiens
attgaatgttgaaggamgcatcagtaaaacaag

SEQ ID NO: 13479 - DNA, 33 bp, homo sapiens
aggggaccaaattacawtcctaacaaataagat

SEQ ID NO: 13480 - DNA, 33 bp, homo sapiens
atgtgaaaatgcatgaygaccacctggcgcagt

SEQ ID NO: 13481 - DNA, 33 bp, homo sapiens
agaggtgacttgatacrgtagaaagggcatgga

SEQ ID NO: 13482 - DNA, 33 bp, homo sapiens
tacgaggtgagattaaragaatgtagtgtgtgg

SEQ ID NO: 13483 - DNA, 33 bp, homo sapiens
aaaatcctaggttgatmaattgaatatggcttc

SEQ ID NO: 13484 - DNA, 33 bp, homo sapiens
atatagaaaaatagctwaaaaagacatctggag

SEQ ID NO: 13485 - DNA, 33 bp, homo sapiens
agttgtaaaatcatttsaaacccaaactctgac

SEQ ID NO: 13486 - DNA, 33 bp, homo sapiens
aaataaaatgaaggtakgatttcaggagttcaa

SEQ ID NO: 13487 - DNA, 33 bp, homo sapiens
gtattcaaatcttggcmaatatccaactagcaa

SEQ ID NO: 13488 - DNA, 33 bp, homo sapiens
agaaagctagggtaaarggagttcttacatttc

SEQ ID NO: 13489 - DNA, 33 bp, homo sapiens
cagcttcacaattgtaktaaggactagagcata

SEQ ID NO: 13490 - DNA, 33 bp, homo sapiens
catagtggaaatggtaygtattaagtcttaagc

SEQ ID NO: 13491 - DNA, 33 bp, homo sapiens
ctaaacaaataagccartcttctctaagtgcaa

SEQ ID NO: 13492 - DNA, 33 bp, homo sapiens
tccaaggaaggcaggarctaggcagataggagc

SEQ ID NO: 13493 - DNA, 33 bp, homo sapiens
agtagctgaagcagaaraactgtgggaaaatca

SEQ ID NO: 13494 - DNA, 33 bp, homo sapiens
catttactcagccccaraatatagtaaagtggc

SEQ ID NO: 13495 - DNA, 33 bp, homo sapiens
agaacatcttgaaaaamtctagacatatggtaa

SEQ ID NO: 13496 - DNA, 33 bp, homo sapiens
acccttttaaacagccrctgaattccataaagc

SEQ ID NO: 13497 - DNA, 33 bp, homo sapiens
tcctctgtattgtacaytcttgttcaaggcagc

SEQ ID NO: 13498 - DNA, 33 bp, homo sapiens
gtatgacactgtataamgtgggttaccatttat

SEQ ID NO: 13499 - DNA, 33 bp, homo sapiens
ttttaaaagaataattyaactgaccacagtcaa

SEQ ID NO: 13500 - DNA, 33 bp, homo sapiens
tgtcatcgctttccaarttactttagaaatgcc

SEQ ID NO: 13501 - DNA, 33 bp, homo sapiens
gttaatgtttggtactracaacgcaaacaggta

SEQ ID NO: 13502 - DNA, 33 bp, homo sapiens
ccttaggcatagaaagraatggaattactgcac

SEQ ID NO: 13503 - DNA, 33 bp, homo sapiens
aacatttggtaaggaartaatcatctttcatta

SEQ ID NO: 13504 - DNA, 33 bp, homo sapiens
taagttggtttttagayacgatgacattgaggc

SEQ ID NO: 13505 - DNA, 33 bp, homo sapiens
actgaaatacaatccaygcagagtaaatacatg

SEQ ID NO: 13506 - DNA, 33 bp, homo sapiens
tcctccttttcaatackgatgccctcaatttct

SEQ ID NO: 13507 - DNA, 33 bp, homo sapiens
ggaggaggcagattgasggtgacgggtacctgc

SEQ ID NO: 13508 - DNA, 33 bp, homo sapiens
tcagttgaagatcacayaagctaagagtggcgc

SEQ ID NO: 13509 - DNA, 33 bp, homo sapiens
cccagaatcttggatakaaatgaaacttggaac

SEQ ID NO: 13510 - DNA, 33 bp, homo sapiens
tacttattccaattagmaattatcacagtttcc

SEQ ID NO: 13511 - DNA, 33 bp, homo sapiens
aagccatattggaaackaattttgacaagatgt

SEQ ID NO: 13512 - DNA, 33 bp, homo sapiens
ttactgctccttttcargtactctgggtgcttt

SEQ ID NO: 13513 - DNA, 33 bp, homo sapiens
tatagcagctttgacartccccctcttgattca

SEQ ID NO: 13514 - DNA, 33 bp, homo sapiens
ttagaaggtctcctaaytcaatatgtcaacagc

SEQ ID NO: 13515 - DNA, 33 bp, homo sapiens
cttttcactcctgcccraatcttaagaccagtt

SEQ ID NO: 13516 - DNA, 33 bp, homo sapiens
tatatggcaccagacaygaagagtgttcacctt

SEQ ID NO: 13517 - DNA, 33 bp, homo sapiens
atatcttatcgggctcyctgactcaggtcttta

SEQ ID NO: 13518 - DNA, 33 bp, homo sapiens
tgaacttttaactggaraggagctctgctatac

SEQ ID NO: 13519 - DNA, 33 bp, homo sapiens
tggtaatcttcctgaaygacattcttagtaata

SEQ ID NO: 13520 - DNA, 33 bp, homo sapiens
aggttaaagagagtacraaggtcagagcacccc

SEQ ID NO: 13521 - DNA, 33 bp, homo sapiens
cttacttggagaagtaycccatttaattatgtg

SEQ ID NO: 13522 - DNA, 33 bp, homo sapiens
tacgtgagaagaaaccrcccaggggataatcta

SEQ ID NO: 13523 - DNA, 33 bp, homo sapiens
ctctcattaaaactcartgaagtactgaccagg

SEQ ID NO: 13524 - DNA, 33 bp, homo sapiens
gatgccttttacctctraatattcagtgaactg

SEQ ID NO: 13525 - DNA, 33 bp, homo sapiens
cctcctcagaaatgtcrccatcctatccaaaaa

SEQ ID NO: 13526 - DNA, 33 bp, homo sapiens
agaggaagtgcagtgayactgttaagagcaggg

SEQ ID NO: 13527 - DNA, 33 bp, homo sapiens
ctggttccttctcaccmacaagtgaacaacctg

SEQ ID NO: 13528 - DNA, 33 bp, homo sapiens
acaggtggggtttaacrgtgggcatagtagaaa

SEQ ID NO: 13529 - DNA, 33 bp, homo sapiens
agaaaattgcaaaatcraaattaattaaacttc

SEQ ID NO: 13530 - DNA, 33 bp, homo sapiens
ttattcattcattgaamaaatatgcactaaata

SEQ ID NO: 13531 - DNA, 33 bp, homo sapiens
gtgtctgcctcttaaarccacttctcaggcagc

SEQ ID NO: 13532 - DNA, 33 bp, homo sapiens
gactggaagtagataayggggttgtgaagagtc

SEQ ID NO: 13533 - DNA, 33 bp, homo sapiens
ctacatcataccccacraagtggaatggcagaa

SEQ ID NO: 13534 - DNA, 33 bp, homo sapiens
gttcatccagatcaackcagctgaactcaaggg

SEQ ID NO: 13535 - DNA, 33 bp, homo sapiens
ggttgtgtagaaggaamagagggctgcttttat

SEQ ID NO: 13536 - DNA, 33 bp, homo sapiens
ctggagagtgagcaacrggtctaagtccccttt

SEQ ID NO: 13537 - DNA, 33 bp, homo sapiens
cacacatacacacacamaacgttcttttagcta

SEQ ID NO: 13538 - DNA, 33 bp, homo sapiens
ggagagcagaaagtcartccggaagacccagtc

SEQ ID NO: 13539 - DNA, 33 bp, homo sapiens
gctttcacttggttcartattgtgtggatttat

SEQ ID NO: 13540 - DNA, 33 bp, homo sapiens
tcagtgttctgtcagaraggagctgagcctgag

SEQ ID NO: 13541 - DNA, 33 bp, homo sapiens
ggaggcacaggcaccarcaatttctctgcagct

SEQ ID NO: 13542 - DNA, 33 bp, homo sapiens
ggggtgtctcctcaacrgtggtgttccaccctg

SEQ ID NO: 13543 - DNA, 33 bp, homo sapiens
ttcctgccttcaggaarcccttctagcaaaaag

SEQ ID NO: 13544 - DNA, 33 bp, homo sapiens
ttctcccattatatacrcgggtctcatggtgcg

SEQ ID NO: 13545 - DNA, 33 bp, homo sapiens
tattactgtatatagartcaatgcacaggttat

SEQ ID NO: 13546 - DNA, 33 bp, homo sapiens
tctgagtacataagccmatcagagaccttcata

SEQ ID NO: 13547 - DNA, 33 bp, homo sapiens
gggttgcaatacaggarcggaacccagagcttg

SEQ ID NO: 13548 - DNA, 33 bp, homo sapiens
cgggagtttgctacagsagtctggaggtagaga

SEQ ID NO: 13549 - DNA, 33 bp, homo sapiens
attaataaagcacagasctatgaatcaagagtc

SEQ ID NO: 13550 - DNA, 33 bp, homo sapiens
ttcttaggagtcaggasatcttccctgggttaa

SEQ ID NO: 13551 - DNA, 33 bp, homo sapiens
ggctttaaattttccawtcccaaaaatgtataa

SEQ ID NO: 13552 - DNA, 33 bp, homo sapiens
gactcttatgaataaakctacgatgaatagaca

SEQ ID NO: 13553 - DNA, 33 bp, homo sapiens
caacctgaaaatgatcyagggaaccaagtattt

SEQ ID NO: 13554 - DNA, 33 bp, homo sapiens
aaaactttcagcatccsatatagtaaaattctc

SEQ ID NO: 13555 - DNA, 33 bp, homo sapiens
gagagttttaacagtargagaaatgaatgtgaa

SEQ ID NO: 13556 - DNA, 33 bp, homo sapiens
cagtaatgaaaactgakgggacaatgtggtgca

SEQ ID NO: 13557 - DNA, 33 bp, homo sapiens
ctctcccatgcctataygcaatggctagtacag

SEQ ID NO: 13558 - DNA, 33 bp, homo sapiens
ctcctataattttctgkagtcttcttgataatt

SEQ ID NO: 13559 - DNA, 33 bp, homo sapiens
aaggacatttacaacaratttctgattttattt

SEQ ID NO: 13560 - DNA, 33 bp, homo sapiens
aaggatggttaatatcyctatgaattaagccag

SEQ ID NO: 13561 - DNA, 33 bp, homo sapiens
ggttaatccacccagaraaggccaccgtaacag

SEQ ID NO: 13562 - DNA, 33 bp, homo sapiens
tgagaagcagttctggmaaaactaaagtctcaa

SEQ ID NO: 13563 - DNA, 33 bp, homo sapiens
ccaccggatgccagtascacaaaaatgtctccg

SEQ ID NO: 13564 - DNA, 33 bp, homo sapiens
acttggttctggaaaartactgtactccctaaa

SEQ ID NO: 13565 - DNA, 33 bp, homo sapiens
acatctgatgcctatcwcccgttgtttctatac

SEQ ID NO: 13566 - DNA, 33 bp, homo sapiens
atgatgggaggtaaacrgtggccaggaataagc

SEQ ID NO: 13567 - DNA, 33 bp, homo sapiens
tgaatgagctgtaacamaaaggagccgaaacac

SEQ ID NO: 13568 - DNA, 33 bp, homo sapiens
ctcagataaaagttgcrctgtgctcacattttt

SEQ ID NO: 13569 - DNA, 33 bp, homo sapiens
ccaggtccagaattcaygtttcttcaactcaag

SEQ ID NO: 13570 - DNA, 33 bp, homo sapiens
tcacattatttccatgraagcctgtctgctgtc

SEQ ID NO: 13571 - DNA, 33 bp, homo sapiens
aggtaaaataaccagtraatcaaaacctgactg

SEQ ID NO: 13572 - DNA, 33 bp, homo sapiens
catccaaaatattatascattaattcaagaaac

SEQ ID NO: 13573 - DNA, 33 bp, homo sapiens
cttagcataatgtcccraaggtttatccatgct

SEQ ID NO: 13574 - DNA, 33 bp, homo sapiens
ctttaaaaagtgatagracacaagaagcacaca

SEQ ID NO: 13575 - DNA, 33 bp, homo sapiens
tttgtgcattaccttaygagtgatgtctaatca

SEQ ID NO: 13576 - DNA, 33 bp, homo sapiens
aacgtatacttgcaacygaagaataccactccc

SEQ ID NO: 13577 - DNA, 33 bp, homo sapiens
ttgctcctaacttacawgccatagaaatttgag

SEQ ID NO: 13578 - DNA, 33 bp, homo sapiens
aaagacatactcccacrctatttcgcatttact

SEQ ID NO: 13579 - DNA, 33 bp, homo sapiens
tctccttgcacatttaratttttaacctatcat

SEQ ID NO: 13580 - DNA, 33 bp, homo sapiens
ccattgcagttttctcygaaggatccagagcac

SEQ ID NO: 13581 - DNA, 33 bp, homo sapiens
tagagttgagttggagwctagcaaataagattg

SEQ ID NO: 13582 - DNA, 33 bp, homo sapiens
gtagtattccatggtaygtatgtatccaagttt

SEQ ID NO: 13583 - DNA, 33 bp, homo sapiens
accttagatttagcaayggtttcttagatatga

SEQ ID NO: 13584 - DNA, 33 bp, homo sapiens
taattaatatgtgaaargaacaacattaggttt

SEQ ID NO: 13585 - DNA, 33 bp, homo sapiens
gggaatcacactgaaasgcaagaaaggatcctg

SEQ ID NO: 13586 - DNA, 33 bp, homo sapiens
agtggtgcctgcttacygaatctgagaaggtta

SEQ ID NO: 13587 - DNA, 33 bp, homo sapiens
ggttaggatacttggcygaggtaacacagtagt

SEQ ID NO: 13588 - DNA, 33 bp, homo sapiens
gctaagtgaaataagcsagatatggaaggacaa

SEQ ID NO: 13589 - DNA, 33 bp, homo sapiens
caaaattaaagtgctcrcatgaaatctagctag

SEQ ID NO: 13590 - DNA, 33 bp, homo sapiens
ttccttcatgagaatartaagatggcaaaactc

SEQ ID NO: 13591 - DNA, 33 bp, homo sapiens
gcctgtgaaatgaaaasttacaccaggagttcc

SEQ ID NO: 13592 - DNA, 33 bp, homo sapiens
cgggaatgggtggatamatgctcctgattcttc

SEQ ID NO: 13593 - DNA, 33 bp, homo sapiens
ctgggcaggttgctgcygatcgtgggtcaaagt

SEQ ID NO: 13594 - DNA, 33 bp, homo sapiens
cataatggacatttgcrccctttaaggaagtaa

SEQ ID NO: 13595 - DNA, 33 bp, homo sapiens
gactctgagtggtgtcrcaaggaaccttatgca

SEQ ID NO: 13596 - DNA, 33 bp, homo sapiens
agctctccgtcaactcrcggggtttaacagaga

SEQ ID NO: 13597 - DNA, 33 bp, homo sapiens
gcaaaggtgcctgttaygacttcatgaagactg

SEQ ID NO: 13598 - DNA, 33 bp, homo sapiens
catcttgcactaagctyactccgcattcttttg

SEQ ID NO: 13599 - DNA, 33 bp, homo sapiens
gttcgtggcattagtawgtgactcctgtgttga

SEQ ID NO: 13600 - DNA, 33 bp, homo sapiens
accatttgtcaataaawcccagaactatgctac

SEQ ID NO: 13601 - DNA, 33 bp, homo sapiens
ctgcatatcatgaaaayaaaactttctgagaaa

SEQ ID NO: 13602 - DNA, 33 bp, homo sapiens
gatttggaagaggaccraaaacacttctctaaa

SEQ ID NO: 13603 - DNA, 33 bp, homo sapiens
acaggtcttggtcttawatctcaaaggtgccta

SEQ ID NO: 13604 - DNA, 33 bp, homo sapiens
aggaaagttattggagsaatccaggccaaacaa

SEQ ID NO: 13605 - DNA, 33 bp, homo sapiens
ggctaaggtaacaaccrgaaggtactcattcca

SEQ ID NO: 13606 - DNA, 33 bp, homo sapiens
atactcaacaatgcctyaaatgccagcagaccc

SEQ ID NO: 13607 - DNA, 33 bp, homo sapiens
aagccaaaatcacagcragtttttaaaaagcat

SEQ ID NO: 13608 - DNA, 33 bp, homo sapiens
tctggtatgaatatgaygatgttcgtggctatc

SEQ ID NO: 13609 - DNA, 33 bp, homo sapiens
gagtcctaaattcaagkccccttaatatgtgct

SEQ ID NO: 13610 - DNA, 33 bp, homo sapiens
aggttgggcatactgayggacccaaagaccttg

SEQ ID NO: 13611 - DNA, 33 bp, homo sapiens
atgagttctgcttcagyacttggagttgcagaa

SEQ ID NO: 13612 - DNA, 33 bp, homo sapiens
tgcggtatgtgaacaastggaggatgagcaagg

SEQ ID NO: 13613 - DNA, 33 bp, homo sapiens
ccaagaggaacatatawcaggtcctggtggttt

SEQ ID NO: 13614 - DNA, 33 bp, homo sapiens
taccaagatactgaggkaagtactagtggcata

SEQ ID NO: 13615 - DNA, 33 bp, homo sapiens
accaaggaatccacacrctaattgagtcaacat

SEQ ID NO: 13616 - DNA, 33 bp, homo sapiens
tttccactaagctgcckcaaataccaattacat

SEQ ID NO: 13617 - DNA, 33 bp, homo sapiens
tctagtgccaacaaaaygcctggcactgcactt

SEQ ID NO: 13618 - DNA, 33 bp, homo sapiens
taacctctttcctaccygacccagagagatcca

SEQ ID NO: 13619 - DNA, 33 bp, homo sapiens
aaaataaggatcataaytgtgcctacctcatgg

SEQ ID NO: 13620 - DNA, 33 bp, homo sapiens
attttgactccagaaaygaacagttcacaaaac

SEQ ID NO: 13621 - DNA, 33 bp, homo sapiens
accctgctgtcactaarccccagtctgggtggc

SEQ ID NO: 13622 - DNA, 33 bp, homo sapiens
ccttcttctctgaagcrgaccttaaaacctagg

SEQ ID NO: 13623 - DNA, 33 bp, homo sapiens
ctgggttgagggacaaygcaactattaagtaga

SEQ ID NO: 13624 - DNA, 33 bp, homo sapiens
cctttcacaaaagaaasgatgcagttttgctga

SEQ ID NO: 13625 - DNA, 33 bp, homo sapiens
ctacaaattagcttcaragatgcaaaataaaac

SEQ ID NO: 13626 - DNA, 33 bp, homo sapiens
gatttggaaactgaaawcttgctgagttgtact

SEQ ID NO: 13627 - DNA, 33 bp, homo sapiens
ccttaacaggatactawgctctagtacttctga

SEQ ID NO: 13628 - DNA, 33 bp, homo sapiens
tttttctgtgccactayaaaatctcttgacatt

SEQ ID NO: 13629 - DNA, 33 bp, homo sapiens
ggagagcctgttgataycatcatttggtaggca

SEQ ID NO: 13630 - DNA, 33 bp, homo sapiens
agtgtggaaacaaggcygaaagaagtggccaga

SEQ ID NO: 13631 - DNA, 33 bp, homo sapiens
cctttgctcgagtccayagccgagtgagaaatg

SEQ ID NO: 13632 - DNA, 33 bp, homo sapiens
ttggaatctgagatgaygacacaagttcaaaat

SEQ ID NO: 13633 - DNA, 33 bp, homo sapiens
atgaaagcagcgtcatkacatcttctaagaatc

SEQ ID NO: 13634 - DNA, 33 bp, homo sapiens
ctgtcaggctgcaaaaygtaggacattggtagg

SEQ ID NO: 13635 - DNA, 33 bp, homo sapiens
tgatctttgcctctaaygtatttcatgaaccat

SEQ ID NO: 13636 - DNA, 33 bp, homo sapiens
acctatctgtaatacargcaaaaatgagaaaat

SEQ ID NO: 13637 - DNA, 33 bp, homo sapiens
ttatctctccaaactgyatttcattttagcagt

SEQ ID NO: 13638 - DNA, 33 bp, homo sapiens
agagcacaagtggaccrgaacctggaaaaatgt

SEQ ID NO: 13639 - DNA, 33 bp, homo sapiens
actaaaacctcagaaawtcctgcctttggaaaa

SEQ ID NO: 13640 - DNA, 33 bp, homo sapiens
acatcagcctgatctastactgttgtaatactt

SEQ ID NO: 13641 - DNA, 33 bp, homo sapiens
tacttcttatattacawagatacaatggcaatc

SEQ ID NO: 13642 - DNA, 33 bp, homo sapiens
ggatagtcaagactcaygtttattcagatgctc

SEQ ID NO: 13643 - DNA, 33 bp, homo sapiens
aaacaggaaggttcatkagtcccatgttgcaaa

SEQ ID NO: 13644 - DNA, 33 bp, homo sapiens
agaccatccatcccacrgcatctgattccttgg

SEQ ID NO: 13645 - DNA, 33 bp, homo sapiens
agcacagttaactacasacttcaaaaagaggtg

SEQ ID NO: 13646 - DNA, 33 bp, homo sapiens
cctgcactgtaacggcyatgtttatcctctgct

SEQ ID NO: 13647 - DNA, 33 bp, homo sapiens
tgacggattgagtagcrcgtttgtcaggttatg

SEQ ID NO: 13648 - DNA, 33 bp, homo sapiens
aactgcttttattgacraccacataaaatcacc

SEQ ID NO: 13649 - DNA, 33 bp, homo sapiens
taacactaatttttcartatatacctataactg

SEQ ID NO: 13650 - DNA, 33 bp, homo sapiens
ttgcttagttttatgamctcgaatttttccaag

SEQ ID NO: 13651 - DNA, 33 bp, homo sapiens
tatgtatgtcactgacyagaaaacaaaaaaagt

SEQ ID NO: 13652 - DNA, 33 bp, homo sapiens
atgttttcatttgtcaygcagaataaatcaaga

SEQ ID NO: 13653 - DNA, 33 bp, homo sapiens
atataacttgaggtaarataaacatccagttct

SEQ ID NO: 13654 - DNA, 33 bp, homo sapiens
tttccagggaaggcaarcattctgggatgtcaa

SEQ ID NO: 13655 - DNA, 33 bp, homo sapiens
acaacattaaaatgccycatatcccatatttaa

SEQ ID NO: 13656 - DNA, 33 bp, homo sapiens
tcctcttttataagcawatcattttggtagtta

SEQ ID NO: 13657 - DNA, 33 bp, homo sapiens
cagggatataattggaragcattatgctgagct

SEQ ID NO: 13658 - DNA, 33 bp, homo sapiens
aagttgcagaaaaatgsataaagtatcatacca

SEQ ID NO: 13659 - DNA, 33 bp, homo sapiens
gtaataaaccttcacaygtatcctcaaacctta

SEQ ID NO: 13660 - DNA, 33 bp, homo sapiens
tctcatcatctcaaacrcaagtagtaaaacaaa

SEQ ID NO: 13661 - DNA, 33 bp, homo sapiens
atattcagtgttcagargacctaaactttcaag

SEQ ID NO: 13662 - DNA, 33 bp, homo sapiens
accagaaagcaggtcckcaccaggtacaaaatc

SEQ ID NO: 13663 - DNA, 33 bp, homo sapiens
cacaggcaagagagacracgtggtagcctggcg

SEQ ID NO: 13664 - DNA, 33 bp, homo sapiens
gaaaataggcttagacrggaaaacaaactaatt

SEQ ID NO: 13665 - DNA, 33 bp, homo sapiens
tttctctaatttatggraaggtactggtaacag

SEQ ID NO: 13666 - DNA, 33 bp, homo sapiens
gaggcaatcctaaggayggaagaacacagagag

SEQ ID NO: 13667 - DNA, 33 bp, homo sapiens
atttgttttggtcccawcttccaaaaatgaaga

SEQ ID NO: 13668 - DNA, 33 bp, homo sapiens
atacctgatttaatccrgaagagtcatcctgtc

SEQ ID NO: 13669 - DNA, 33 bp, homo sapiens
tccggaaggatttccaygacctccagtctgaga

SEQ ID NO: 13670 - DNA, 33 bp, homo sapiens
gaggctatgacatcaasagatcttttctgaggc

SEQ ID NO: 13671 - DNA, 33 bp, homo sapiens
cttttgaactaaaaaaygtgtgtaagtacatat

SEQ ID NO: 13672 - DNA, 33 bp, homo sapiens
cttataagcttttgggmaataactaacctatac

SEQ ID NO: 13673 - DNA, 33 bp, homo sapiens
tgaatcacctctgctckcatttagtacggcaaa

SEQ ID NO: 13674 - DNA, 33 bp, homo sapiens
ccttgcacctaccaagmacgtattatacctggc

SEQ ID NO: 13675 - DNA, 33 bp, homo sapiens
atattgtattgatcgaygatggatggtgactat

SEQ ID NO: 13676 - DNA, 33 bp, homo sapiens
aactctatgccacttgyatggataattgatgta

SEQ ID NO: 13677 - DNA, 33 bp, homo sapiens
cttttctttttttatcmaaatctggacaaacta

SEQ ID NO: 13678 - DNA, 33 bp, homo sapiens
gttacaatttgacctgmaaacatacatttcact

SEQ ID NO: 13679 - DNA, 33 bp, homo sapiens
tatagatgtttccaacratactttcatcaacat

SEQ ID NO: 13680 - DNA, 33 bp, homo sapiens
gtaaagctatggcataygagtttttttgtaact

SEQ ID NO: 13681 - DNA, 33 bp, homo sapiens
gtgatgaaatcagggcmatttggatatccatca

SEQ ID NO: 13682 - DNA, 33 bp, homo sapiens
aatggtgcatacacacrattgcacagtgcacat

SEQ ID NO: 13683 - DNA, 33 bp, homo sapiens
attacttgggcttccaygttccactacacagca

SEQ ID NO: 13684 - DNA, 33 bp, homo sapiens
gcctcttatctatcacwccttttaatttttttc

SEQ ID NO: 13685 - DNA, 33 bp, homo sapiens
gaactttaatcttttgraggtaattttggtctt

SEQ ID NO: 13686 - DNA, 33 bp, homo sapiens
tataagaatgagatgaraacatggctatcaaag

SEQ ID NO: 13687 - DNA, 33 bp, homo sapiens
gaaagaaacattaggayggtcatggtgggaaga

SEQ ID NO: 13688 - DNA, 33 bp, homo sapiens
gaagaggaaatctcccwatatatgcgcctatta

SEQ ID NO: 13689 - DNA, 33 bp, homo sapiens
cggaaggtgggtgtcaraattttgtgtctcata

SEQ ID NO: 13690 - DNA, 33 bp, homo sapiens
tctttaaaagatacaaygtgccaaacctcaaca

SEQ ID NO: 13691 - DNA, 33 bp, homo sapiens
actacagattctatggrcattaaaacaataata

SEQ ID NO: 13692 - DNA, 33 bp, homo sapiens
aaatcaggctacacgtracatactaaagattat

SEQ ID NO: 13693 - DNA, 33 bp, homo sapiens
aagaggatcaactatarataagagagaagctat

SEQ ID NO: 13694 - DNA, 33 bp, homo sapiens
caatggtgatcttcatwactttctgtgtatctg

SEQ ID NO: 13695 - DNA, 33 bp, homo sapiens
ctgggctggttttggcrgatttcttccagtgag

SEQ ID NO: 13696 - DNA, 33 bp, homo sapiens
actctggttgctatgcygatttttgagaaatgt

SEQ ID NO: 13697 - DNA, 33 bp, homo sapiens
atgtacagttttgtgamtatatttgttaaaaca

SEQ ID NO: 13698 - DNA, 33 bp, homo sapiens
aaatttcaaacagtagyaatcaaatcaatcaca

SEQ ID NO: 13699 - DNA, 33 bp, homo sapiens
cagaaagcacggctgaygacaattttctaaaca

SEQ ID NO: 13700 - DNA, 33 bp, homo sapiens
tatagtgagaaaagtayggcagaaggtaccgac

SEQ ID NO: 13701 - DNA, 33 bp, homo sapiens
ggtcaaacgttgctgcyaagaggtgatagatga

SEQ ID NO: 13702 - DNA, 33 bp, homo sapiens
ttaatcctcttaatccratagtgtagttttcat

SEQ ID NO: 13703 - DNA, 33 bp, homo sapiens
tgggactagtcacacgrccctgcctaacagtaa

SEQ ID NO: 13704 - DNA, 33 bp, homo sapiens
gtggcagggaaagtacrggatgagtctgaacca

SEQ ID NO: 13705 - DNA, 33 bp, homo sapiens
acaatgaggccacaaakttgaaaaaagactcaa

SEQ ID NO: 13706 - DNA, 33 bp, homo sapiens
gggctgtcctgctgtaraccttcacatcagaga

SEQ ID NO: 13707 - DNA, 33 bp, homo sapiens
tgattctggggataaarctgtgaaccagataaa

SEQ ID NO: 13708 - DNA, 33 bp, homo sapiens
caaactttgggagacayggagtttatagtttag

SEQ ID NO: 13709 - DNA, 33 bp, homo sapiens
ttctggaagcttcgccractcctccaagccaca

SEQ ID NO: 13710 - DNA, 33 bp, homo sapiens
tccttatgagaagggamaatctggacacacaca

SEQ ID NO: 13711 - DNA, 33 bp, homo sapiens
tcgtggattcactgcarctgtcggatgcgagtt

SEQ ID NO: 13712 - DNA, 33 bp, homo sapiens
cccagaaactgaggcaraggactgaagctactc

SEQ ID NO: 13713 - DNA, 33 bp, homo sapiens
gggactgccggtcgtaygttgatgccattgggt

SEQ ID NO: 13714 - DNA, 33 bp, homo sapiens
agaggcatctgccatgrataaggagaggcgagc

SEQ ID NO: 13715 - DNA, 33 bp, homo sapiens
tcttaaatatggctgasagaaacgagctaaaat

SEQ ID NO: 13716 - DNA, 33 bp, homo sapiens
attaaagaggtggagawgagatcagtaattttc

SEQ ID NO: 13717 - DNA, 33 bp, homo sapiens
tcttcatcaatggaaartgaagatgttatgttt

SEQ ID NO: 13718 - DNA, 33 bp, homo sapiens
agccataggcagcagaractttggagccaaagc

SEQ ID NO: 13719 - DNA, 33 bp, homo sapiens
tgactggattacaacasattgccttgtaaaaat

SEQ ID NO: 13720 - DNA, 33 bp, homo sapiens
gaatcacttgagcctcrgagctggagtttgcag

SEQ ID NO: 13721 - DNA, 33 bp, homo sapiens
gatcgggtgatcaggasagacatcggaggagat

SEQ ID NO: 13722 - DNA, 33 bp, homo sapiens
acgaacaagacagaaartgttctatgcacatgg

SEQ ID NO: 13723 - DNA, 33 bp, homo sapiens
ctcaacagtgcagaaaygtgctcaccaaaaaga

SEQ ID NO: 13724 - DNA, 33 bp, homo sapiens
tctctatgtccataccwcctttgcaatgtgact

SEQ ID NO: 13725 - DNA, 33 bp, homo sapiens
agggactgaatttaatyagacatcgttagttct

SEQ ID NO: 13726 - DNA, 33 bp, homo sapiens
aatatgaagctagaacycaatgggacctagata

SEQ ID NO: 13727 - DNA, 33 bp, homo sapiens
attcaaagctgtactamaagaccaagcaatgtg

SEQ ID NO: 13728 - DNA, 33 bp, homo sapiens
ctaaggtattcttccaytgagctttcaactccc

SEQ ID NO: 13729 - DNA, 33 bp, homo sapiens
gggggcttccaaagacragctaagtgcccaata

SEQ ID NO: 13730 - DNA, 33 bp, homo sapiens
tgctccagctgcttcakcccatcttggcaactt

SEQ ID NO: 13731 - DNA, 33 bp, homo sapiens
cagattctacatcagcratccttagtgcctgtt

SEQ ID NO: 13732 - DNA, 33 bp, homo sapiens
ctgctgtgtcatttaasaatggtgatggtaaac

SEQ ID NO: 13733 - DNA, 33 bp, homo sapiens
actgctctacacaacaytactgtcaaaaggaac

SEQ ID NO: 13734 - DNA, 33 bp, homo sapiens
gtttcctggtgatccaktccttaatttattccc

SEQ ID NO: 13735 - DNA, 33 bp, homo sapiens
cagaaggcaacacgacyaggcaacaccttgatt

SEQ ID NO: 13736 - DNA, 33 bp, homo sapiens
ctttgcctcccaccaayggacattatttggaat

SEQ ID NO: 13737 - DNA, 33 bp, homo sapiens
ggtgggaattataaacrctcacttaaaatgaac

SEQ ID NO: 13738 - DNA, 33 bp, homo sapiens
ctcccacaagcaatgtraaaagacaaactgaga

SEQ ID NO: 13739 - DNA, 33 bp, homo sapiens
atttagtgcaaaaacaycaatgtgccaacccac

SEQ ID NO: 13740 - DNA, 33 bp, homo sapiens
accaggaccagtccacraaaagctgaggcactc

SEQ ID NO: 13741 - DNA, 33 bp, homo sapiens
caccttggcccgttcasgctctctactctgtaa

SEQ ID NO: 13742 - DNA, 33 bp, homo sapiens
ttccagccctttctccycaattctctataacct

SEQ ID NO: 13743 - DNA, 33 bp, homo sapiens
tcctccttccctctaaracttttctctgttcct

SEQ ID NO: 13744 - DNA, 33 bp, homo sapiens
ccaaatgaatgtcgaasaagagaatttatggtg

SEQ ID NO: 13745 - DNA, 33 bp, homo sapiens
gttgcttccacaccaamgatcagcctgaagtct

SEQ ID NO: 13746 - DNA, 33 bp, homo sapiens
ataaccataagagaaayttccagcagtacttca

SEQ ID NO: 13747 - DNA, 33 bp, homo sapiens
tccccagaagaggagcyactggcttgacacctt

SEQ ID NO: 13748 - DNA, 33 bp, homo sapiens
cccttatacttctccaracatttttacctgaat

SEQ ID NO: 13749 - DNA, 33 bp, homo sapiens
ctccagtttgggtcaakaagtgaggatctgtct

SEQ ID NO: 13750 - DNA, 33 bp, homo sapiens
gcagcgggagactgaaraacaaagattccctac

SEQ ID NO: 13751 - DNA, 33 bp, homo sapiens
tctgtgctttaatgaaraaatggggtcgtgctg

SEQ ID NO: 13752 - DNA, 33 bp, homo sapiens
acccggagatgctcacycggctgttccctttta

SEQ ID NO: 13753 - DNA, 33 bp, homo sapiens
atgcacacacaggagaycatcaccccaacatag

SEQ ID NO: 13754 - DNA, 33 bp, homo sapiens
cccatgtctacaaaacrataattagccaggaat

SEQ ID NO: 13755 - DNA, 33 bp, homo sapiens
atggagaaatcaactcyagtttcagggggttgg

SEQ ID NO: 13756 - DNA, 33 bp, homo sapiens
gactgttagcagataartatttgttgtgttctt

SEQ ID NO: 13757 - DNA, 33 bp, homo sapiens
tgtggggtcgttttatsaatggactcaagccgt

SEQ ID NO: 13758 - DNA, 33 bp, homo sapiens
cacaagcagatgtggcmgatctcccaggtgtta

SEQ ID NO: 13759 - DNA, 33 bp, homo sapiens
aaaacgatacacagaaygtaagggtcagggtga

SEQ ID NO: 13760 - DNA, 33 bp, homo sapiens
cttttttccatttccaygtgcttttgtgttcca

SEQ ID NO: 13761 - DNA, 33 bp, homo sapiens
gaggccgagccagctgsatcggttgaggtcagg

SEQ ID NO: 13762 - DNA, 33 bp, homo sapiens
agaccttgttacatcarcttacatcatcttaca

SEQ ID NO: 13763 - DNA, 33 bp, homo sapiens
ccctgctcacaacggawtaaactcctagtgtgg

SEQ ID NO: 13764 - DNA, 33 bp, homo sapiens
caagattcatcacaccygactcaaagtagcaac

SEQ ID NO: 13765 - DNA, 33 bp, homo sapiens
ggtgccagagctcatcrcgtagtcgccagcagc

SEQ ID NO: 13766 - DNA, 33 bp, homo sapiens
gtggcacaacctaaaaygcacaggacactcccc

SEQ ID NO: 13767 - DNA, 33 bp, homo sapiens
gctttttaaaatgggcyagagtccgggcatggt

SEQ ID NO: 13768 - DNA, 33 bp, homo sapiens
ccttgattcctgttccragtcagctgctagaca

SEQ ID NO: 13769 - DNA, 33 bp, homo sapiens
tctgcttcacctacgayctgttcctgaacctgg

SEQ ID NO: 13770 - DNA, 33 bp, homo sapiens
agatgcagtcacatgargggatgctggccgggg

SEQ ID NO: 13771 - DNA, 33 bp, homo sapiens
tccagtgggggataaasaggttcaaatcagagc

SEQ ID NO: 13772 - DNA, 33 bp, homo sapiens
accttgaaaatctccaraatgccttcagggtct

SEQ ID NO: 13773 - DNA, 33 bp, homo sapiens
ctaaaaaatgataccarcgtatgatccagcaat

SEQ ID NO: 13774 - DNA, 33 bp, homo sapiens
aatcgcatgaaataaargaatatttacacacac

SEQ ID NO: 13775 - DNA, 33 bp, homo sapiens
gaaacactgaccttaaygagtgttggagaagat

SEQ ID NO: 13776 - DNA, 33 bp, homo sapiens
caaaaaaattacacacratggagatatttcata

SEQ ID NO: 13777 - DNA, 33 bp, homo sapiens
tcactgtcaactctaaygtagcaattaagagat

SEQ ID NO: 13778 - DNA, 33 bp, homo sapiens
acttttaccccagttcsagatgacagactgaac

SEQ ID NO: 13779 - DNA, 33 bp, homo sapiens
acccagtgagacagacygccaaataaacggact

SEQ ID NO: 13780 - DNA, 33 bp, homo sapiens
ggcacccaaatgcagasctcactggtggagggg

SEQ ID NO: 13781 - DNA, 33 bp, homo sapiens
tgtcaggagcccagaargaatgggtttcaagtc

SEQ ID NO: 13782 - DNA, 33 bp, homo sapiens
gtctcgggagccctcaraaatgctggagagaca

SEQ ID NO: 13783 - DNA, 33 bp, homo sapiens
tgtgtatgtgactctamtacaatctatccattc

SEQ ID NO: 13784 - DNA, 33 bp, homo sapiens
agcatggatgttagcayggtattattattcttt

SEQ ID NO: 13785 - DNA, 33 bp, homo sapiens
cacccagtccgtcggarctcagaatggcagggc

SEQ ID NO: 13786 - DNA, 33 bp, homo sapiens
gagaatgtgttgcctgyattgcaagggtcagat

SEQ ID NO: 13787 - DNA, 33 bp, homo sapiens
gcctccctgcatccaaygtcaactccatttagt

SEQ ID NO: 13788 - DNA, 33 bp, homo sapiens
agactgaatttacaacwccagtgtccctggttt

SEQ ID NO: 13789 - DNA, 33 bp, homo sapiens
gtaactactaatagccyaccaatcacataaatt

SEQ ID NO: 13790 - DNA, 33 bp, homo sapiens
gtggagccagtgaagasagaattcccgtgaaga

SEQ ID NO: 13791 - DNA, 33 bp, homo sapiens
tgtttagtgtgtaccasgtattagctcatttaa

SEQ ID NO: 13792 - DNA, 33 bp, homo sapiens
catactgcatggttggwaacttcagagttctct

SEQ ID NO: 13793 - DNA, 33 bp, homo sapiens
gatatgaaggcacaaayaggtccctgaaagaac

SEQ ID NO: 13794 - DNA, 33 bp, homo sapiens
ggggggtgaaacaaacrggcgttctccagactc

SEQ ID NO: 13795 - DNA, 33 bp, homo sapiens
ccgacgtagcagtttcraccacattcttttccc

SEQ ID NO: 13796 - DNA, 33 bp, homo sapiens
gaaagaggacttctccrgcccgatggttccctc

SEQ ID NO: 13797 - DNA, 33 bp, homo sapiens
actccaccttcgccacsggaagcaagtgctcag

SEQ ID NO: 13798 - DNA, 33 bp, homo sapiens
cgtgacccaatgagcgrcctttcctgggagttc

SEQ ID NO: 13799 - DNA, 33 bp, homo sapiens
caggatgaggggaaccrcctctatgattcagtt

SEQ ID NO: 13800 - DNA, 33 bp, homo sapiens
acatcatggccccaaayggagaagggacacaaa

SEQ ID NO: 13801 - DNA, 33 bp, homo sapiens
caaggcaacaatattcrcgggtcacattcccat

SEQ ID NO: 13802 - DNA, 33 bp, homo sapiens
ttctcaaaccttaatgyaccgtggagctgtcat

SEQ ID NO: 13803 - DNA, 33 bp, homo sapiens
ttacattgcagcttgargtttggagaacatgga

SEQ ID NO: 13804 - DNA, 33 bp, homo sapiens
ttagatcttcaattcawgttgtttttccaattg

SEQ ID NO: 13805 - DNA, 33 bp, homo sapiens
tataacaagtcaataakctagtacctaaacaat

SEQ ID NO: 13806 - DNA, 33 bp, homo sapiens
agctaaacattgggtgyatatggaaacaaagat

SEQ ID NO: 13807 - DNA, 33 bp, homo sapiens
attcaggactcagaaakgtatggattttattca

SEQ ID NO: 13808 - DNA, 33 bp, homo sapiens
taaattgtgctctcctraagtcaggtttcatgt

SEQ ID NO: 13809 - DNA, 33 bp, homo sapiens
aacgagagattcctgargattgcagtcaataaa

SEQ ID NO: 13810 - DNA, 33 bp, homo sapiens
agctcattcaagcaacrctttctccagttagat

SEQ ID NO: 13811 - DNA, 33 bp, homo sapiens
tcaaagaagattatgaygtatcttcagccccaa

SEQ ID NO: 13812 - DNA, 33 bp, homo sapiens
ttcataaactatgacayctgagcgaaaatgact

SEQ ID NO: 13813 - DNA, 33 bp, homo sapiens
ataggaatgattttgaygctcttagttagactt

SEQ ID NO: 13814 - DNA, 33 bp, homo sapiens
ggttatagaaagttacsactcacatatcacata

SEQ ID NO: 13815 - DNA, 33 bp, homo sapiens
agagtggacttaattamggttgtctcaagattc

SEQ ID NO: 13816 - DNA, 33 bp, homo sapiens
atcactggggccagcamctacgtgaagtgaccc

SEQ ID NO: 13817 - DNA, 33 bp, homo sapiens
aaactggatacacacartcttccaaaattgagc

SEQ ID NO: 13818 - DNA, 33 bp, homo sapiens
cagtgatatgtaacaayatgtaaaatatgaaag

SEQ ID NO: 13819 - DNA, 33 bp, homo sapiens
caccttcagctgaaacwcccaggtatttgcact

SEQ ID NO: 13820 - DNA, 33 bp, homo sapiens
tgcctaagaaaagcacrcctaagtacacatggg

SEQ ID NO: 13821 - DNA, 33 bp, homo sapiens
gtgctgtgagtggtgcyacctacttaggaatca

SEQ ID NO: 13822 - DNA, 33 bp, homo sapiens
gtagtggtgagaagacyaacttcccaaatatta

SEQ ID NO: 13823 - DNA, 33 bp, homo sapiens
ttgagaaactgcatgarcaaacaagatgatcaa

SEQ ID NO: 13824 - DNA, 33 bp, homo sapiens
agtgaaagaaggaagaygcaataggccacatag

SEQ ID NO: 13825 - DNA, 33 bp, homo sapiens
ttttcagatagacaackgtgagtatgagtattt

SEQ ID NO: 13826 - DNA, 33 bp, homo sapiens
aagcttcactgagtacyggctgtgtaacctcag

SEQ ID NO: 13827 - DNA, 33 bp, homo sapiens
attcagatctatttggyacccagttatcactac

SEQ ID NO: 13828 - DNA, 33 bp, homo sapiens
gtagattcaggaaaaaygtgtgggctgcggcat

SEQ ID NO: 13829 - DNA, 33 bp, homo sapiens
gtttgcattttatagasaaatctggtgctgctg

SEQ ID NO: 13830 - DNA, 33 bp, homo sapiens
aggatttgggcagaaaytaactctgcgattgaa

SEQ ID NO: 13831 - DNA, 33 bp, homo sapiens
ctgagttttgaatttayatagctacttgcagtg

SEQ ID NO: 13832 - DNA, 33 bp, homo sapiens
tcactttttgctgttaycttaaggccaagttgc

SEQ ID NO: 13833 - DNA, 33 bp, homo sapiens
cacatcacagatttccrccaagcatttttttcc

SEQ ID NO: 13834 - DNA, 33 bp, homo sapiens
gccagcaactgaagtarcagccaggctaagaga

SEQ ID NO: 13835 - DNA, 33 bp, homo sapiens
cctctttggtaatcacrctaaatcatgagacac

SEQ ID NO: 13836 - DNA, 33 bp, homo sapiens
gaatctccagccataaytgtgaatttatctatt

SEQ ID NO: 13837 - DNA, 33 bp, homo sapiens
aagagtgtttttcttgwagtagcatatagttac

SEQ ID NO: 13838 - DNA, 33 bp, homo sapiens
aaaactaaaactctgargatagctggtcccaat

SEQ ID NO: 13839 - DNA, 33 bp, homo sapiens
catgtgcctttccagcrcagttggatctagctt

SEQ ID NO: 13840 - DNA, 33 bp, homo sapiens
actgcttcacactgaarggcttggatccagatg

SEQ ID NO: 13841 - DNA, 33 bp, homo sapiens
gaagtgtaggaacccasaactggccagagaccc

SEQ ID NO: 13842 - DNA, 33 bp, homo sapiens
cttcaaatgtgaagtawctccaagccacacgga

SEQ ID NO: 13843 - DNA, 33 bp, homo sapiens
caacattgcattattawctttttgtggtgagga

SEQ ID NO: 13844 - DNA, 33 bp, homo sapiens
gctaaatttggggccargtatggtgaagcattc

SEQ ID NO: 13845 - DNA, 33 bp, homo sapiens
gtgtgcacaaaaccaasattacaagccacacat

SEQ ID NO: 13846 - DNA, 33 bp, homo sapiens
aaacaccacaaaaataraagctatgtgagtgat

SEQ ID NO: 13847 - DNA, 33 bp, homo sapiens
ctatctgaatttcggaygtagtgacacttggcg

SEQ ID NO: 13848 - DNA, 33 bp, homo sapiens
tctattgatgtaaaacygccttttgcacctgct

SEQ ID NO: 13849 - DNA, 33 bp, homo sapiens
gcctgatgacaagaccmcaggaatgctgggtgt

SEQ ID NO: 13850 - DNA, 33 bp, homo sapiens
gctatagcaaatcatcrcatgtctaaaaaatgt

SEQ ID NO: 13851 - DNA, 33 bp, homo sapiens
ttccagatcatttcaakaaagtgaatatcgcaa

SEQ ID NO: 13852 - DNA, 33 bp, homo sapiens
tcggattgagttttcasgtttgaaacatatgtt

SEQ ID NO: 13853 - DNA, 33 bp, homo sapiens
agggcatgacaggtggmaacaaaagagataaag

SEQ ID NO: 13854 - DNA, 33 bp, homo sapiens
cccatgatagactacargacaggaagctccgta

SEQ ID NO: 13855 - DNA, 33 bp, homo sapiens
tttgtaccaaaatacgmaattgtattacagcac

SEQ ID NO: 13856 - DNA, 33 bp, homo sapiens
gtttttaccaagaagaygatgagatatgccaga

SEQ ID NO: 13857 - DNA, 33 bp, homo sapiens
agctgtggttttttgayagaccatggtagctca

SEQ ID NO: 13858 - DNA, 33 bp, homo sapiens
agtcttcccttttctayagataggcgtctatac

SEQ ID NO: 13859 - DNA, 33 bp, homo sapiens
tgccctcacccctcaaygtgcttgctgcaaaca

SEQ ID NO: 13860 - DNA, 33 bp, homo sapiens
gaatatagttaccagasagaagcagagcaaatg

SEQ ID NO: 13861 - DNA, 33 bp, homo sapiens
gaaagataccatatgamtcagcgaggctgtggt

SEQ ID NO: 13862 - DNA, 33 bp, homo sapiens
aggtgctagcctgaccygaacaggagatgctga

SEQ ID NO: 13863 - DNA, 33 bp, homo sapiens
tgctcatgcactggtayggctgtgttcacactc

SEQ ID NO: 13864 - DNA, 33 bp, homo sapiens
catgcagaaaagttcaygagtgattagtgtaac

SEQ ID NO: 13865 - DNA, 33 bp, homo sapiens
aggatatatttaacaawcaggaagctctccata

SEQ ID NO: 13866 - DNA, 33 bp, homo sapiens
ccttccccagatctctsaagtcctgtgtccctt

SEQ ID NO: 13867 - DNA, 33 bp, homo sapiens
agagagacatagatacraagaaagtgatgacag

SEQ ID NO: 13868 - DNA, 33 bp, homo sapiens
ggctggtgggaacaaaratatctatcagggcat

SEQ ID NO: 13869 - DNA, 33 bp, homo sapiens
catgttgatgccatcgycaagtcctgatcaggt

SEQ ID NO: 13870 - DNA, 33 bp, homo sapiens
gaaaccacttttgcaargattaagatggcgaga

SEQ ID NO: 13871 - DNA, 33 bp, homo sapiens
ggcctttgttggcccayggtcagtgcctagcga

SEQ ID NO: 13872 - DNA, 33 bp, homo sapiens
tgactttgggacattcwaggggtggcatccagg

SEQ ID NO: 13873 - DNA, 33 bp, homo sapiens
aaatgcaaagtcaacamaaaagagacaaaggaa

SEQ ID NO: 13874 - DNA, 33 bp, homo sapiens
tcttgataacactgaasaaaggcttcacttgtc

SEQ ID NO: 13875 - DNA, 33 bp, homo sapiens
tgtgagactgaacgagrcactaagcaagtgagt

SEQ ID NO: 13876 - DNA, 33 bp, homo sapiens
accacgagggcttcackgagcctggatcccagg

SEQ ID NO: 13877 - DNA, 33 bp, homo sapiens
acagggcaggagaaatkatgactgatggtacag

SEQ ID NO: 13878 - DNA, 33 bp, homo sapiens
tccttctgcttaacacsgaccaatcctgaacaa

SEQ ID NO: 13879 - DNA, 33 bp, homo sapiens
ccagagcctggaaaccrcctatgttcactctag

SEQ ID NO: 13880 - DNA, 33 bp, homo sapiens
tgtgtctgcaagcacaygcgatctggtgctagt

SEQ ID NO: 13881 - DNA, 33 bp, homo sapiens
gtgggcttttgtgaaayccttgtctgacttcct

SEQ ID NO: 13882 - DNA, 33 bp, homo sapiens
ggatgcacgctctttckcctctgcatctttgga

SEQ ID NO: 13883 - DNA, 33 bp, homo sapiens
ggaattggagacctagragccggaagagtaagc

SEQ ID NO: 13884 - DNA, 33 bp, homo sapiens
cataagaggcacctgaracccagaaaaaaggaa

SEQ ID NO: 13885 - DNA, 33 bp, homo sapiens
atgtgacgggcatagayattgactaaggccaaa

SEQ ID NO: 13886 - DNA, 33 bp, homo sapiens
gggctgctacaagaagyaactgaaatactgctg

SEQ ID NO: 13887 - DNA, 33 bp, homo sapiens
aacacaggggttcgaayggtggaagcaggacca

SEQ ID NO: 13888 - DNA, 33 bp, homo sapiens
tgtgttacaactgcacrgatcccattgaaccat

SEQ ID NO: 13889 - DNA, 33 bp, homo sapiens
gtgtcatgtaaaagaartacagtcaattcataa

SEQ ID NO: 13890 - DNA, 33 bp, homo sapiens
agctacctctctattartaaggatgaatgaaga

SEQ ID NO: 13891 - DNA, 33 bp, homo sapiens
acttgacagagaaaaamagaattcccaggtgat

SEQ ID NO: 13892 - DNA, 33 bp, homo sapiens
caatggcaggtataaasgttttattgtaaatat

SEQ ID NO: 13893 - DNA, 33 bp, homo sapiens
ccagaagtacactgtcrccctcatctgagaggt

SEQ ID NO: 13894 - DNA, 33 bp, homo sapiens
ggtatgtaagggatgaygtccggctgaaggtct

SEQ ID NO: 13895 - DNA, 33 bp, homo sapiens
acactcagtacacttgwagggtttctctccact

SEQ ID NO: 13896 - DNA, 33 bp, homo sapiens
gccttcaccttccaacmgtgtggtacctgcctg

SEQ ID NO: 13897 - DNA, 33 bp, homo sapiens
gcacaggctgcattagyaaataccctccagggc

SEQ ID NO: 13898 - DNA, 33 bp, homo sapiens
atatatttacaccttayaggagtagagacacat

SEQ ID NO: 13899 - DNA, 33 bp, homo sapiens
cccttccttgtggactsaaaagcaggctaagta

SEQ ID NO: 13900 - DNA, 33 bp, homo sapiens
tcaagggtttgacacgkatcttgagtgccctct

SEQ ID NO: 13901 - DNA, 33 bp, homo sapiens
tggtaaataatggagaygagaaaatacctgtga

SEQ ID NO: 13902 - DNA, 33 bp, homo sapiens
caaattaatggataccrggagttagggatggca

SEQ ID NO: 13903 - DNA, 33 bp, homo sapiens
agaatacaagtttctcragacaggccagacagt

SEQ ID NO: 13904 - DNA, 33 bp, homo sapiens
attctctaattctgaayggaagaactcctctcc

SEQ ID NO: 13905 - DNA, 33 bp, homo sapiens
ataagtcttgccaccarcgatgcagcccattgc

SEQ ID NO: 13906 - DNA, 33 bp, homo sapiens
cttatcctttcatccaygagcgcctgggttact

SEQ ID NO: 13907 - DNA, 33 bp, homo sapiens
cacagtgcaaaaagaaracacgtgcattatttt

SEQ ID NO: 13908 - DNA, 33 bp, homo sapiens
gtcctacttgataatasgttccttttttctaca

SEQ ID NO: 13909 - DNA, 33 bp, homo sapiens
cctttgtatttctagaygggatgcagcccgatc

SEQ ID NO: 13910 - DNA, 33 bp, homo sapiens
tcaaggagagacttccraatcaaattaatttca

SEQ ID NO: 13911 - DNA, 33 bp, homo sapiens
tttggatgtaagattcyatttctggttgaggtc

SEQ ID NO: 13912 - DNA, 33 bp, homo sapiens
tgctgttcaagaagcamctgaatcaaactgtgc

SEQ ID NO: 13913 - DNA, 33 bp, homo sapiens
ccactcctgtcatggaytcatctctcctcactc

SEQ ID NO: 13914 - DNA, 33 bp, homo sapiens
ggcaaatgcagttctcrataacacactggcatt

SEQ ID NO: 13915 - DNA, 33 bp, homo sapiens
acagttctgcagcctcrcatcttggtgcagtgt

SEQ ID NO: 13916 - DNA, 33 bp, homo sapiens
atagtccactaacttckattactgttcacccag

SEQ ID NO: 13917 - DNA, 33 bp, homo sapiens
gttttgcaaaagcttcrgaaagaaattatggct

SEQ ID NO: 13918 - DNA, 33 bp, homo sapiens
aaaaatcagcactcaakgtattcagtgacaggt

SEQ ID NO: 13919 - DNA, 33 bp, homo sapiens
aggccaggaagcggggrcattgagagccgagat

SEQ ID NO: 13920 - DNA, 33 bp, homo sapiens
agttactaaattgtgayatggaagacagcaaaa

SEQ ID NO: 13921 - DNA, 33 bp, homo sapiens
caaattccttcagtgckaaaagcagaggcagct

SEQ ID NO: 13922 - DNA, 33 bp, homo sapiens
caaaagtgttagaaccrctgacatctcaatagg

SEQ ID NO: 13923 - DNA, 33 bp, homo sapiens
tcttttattagttgccygatgactttgcccaag

SEQ ID NO: 13924 - DNA, 33 bp, homo sapiens
caataaataacagataycatcacaggcatggat

SEQ ID NO: 13925 - DNA, 33 bp, homo sapiens
gcttcaaccatgaggakgagaataatatcctaa

SEQ ID NO: 13926 - DNA, 33 bp, homo sapiens
gcagcagaggggtgcarcataaggaacaaaatg

SEQ ID NO: 13927 - DNA, 33 bp, homo sapiens
gctaggacagtgttacycgacccctttctcctt

SEQ ID NO: 13928 - DNA, 33 bp, homo sapiens
gcaggtatgctgtgtcsctttagccagggtgat

SEQ ID NO: 13929 - DNA, 33 bp, homo sapiens
tgctccaggaagactaycacaagcagggagggg

SEQ ID NO: 13930 - DNA, 33 bp, homo sapiens
gggaaacagctgatccrgccctctagctccagc

SEQ ID NO: 13931 - DNA, 33 bp, homo sapiens
tttaaaatctaaaaagkctgtgcattccccaaa

SEQ ID NO: 13932 - DNA, 33 bp, homo sapiens
ttttacaggtgaagacrctaagacacagagagg

SEQ ID NO: 13933 - DNA, 33 bp, homo sapiens
gctttgatctggctcayggtgaaataagcttgc

SEQ ID NO: 13934 - DNA, 33 bp, homo sapiens
cagaaatcgctgtccartaagagctagtggtta

SEQ ID NO: 13935 - DNA, 33 bp, homo sapiens
tgactgggcgtcttccrctgcataacactcaag

SEQ ID NO: 13936 - DNA, 33 bp, homo sapiens
gaacagaaggataagcragccgctttgaaaatc

SEQ ID NO: 13937 - DNA, 33 bp, homo sapiens
tttcttcctgtccctgycaatatttctgccaca

SEQ ID NO: 13938 - DNA, 33 bp, homo sapiens
gatccgttatagcttcyctggtttccactgtaa

SEQ ID NO: 13939 - DNA, 33 bp, homo sapiens
gctgggagagaatacasggaatgtccaagatat

SEQ ID NO: 13940 - DNA, 33 bp, homo sapiens
gtgtgtgcgtatagtcrcagcttctctggggag

SEQ ID NO: 13941 - DNA, 33 bp, homo sapiens
gccttgctctcagaaaygttgacctcaaccttc

SEQ ID NO: 13942 - DNA, 33 bp, homo sapiens
gtagatgccagatatarcacggtaaattggtaa

SEQ ID NO: 13943 - DNA, 33 bp, homo sapiens
aaagagcaagggcttcrattatgtacaaaccag

SEQ ID NO: 13944 - DNA, 33 bp, homo sapiens
aacatttcaaaaagccrctaaaagatttgagaa

SEQ ID NO: 13945 - DNA, 33 bp, homo sapiens
acgcaagcaaataaaayggtttatgaggaaaga

SEQ ID NO: 13946 - DNA, 33 bp, homo sapiens
ctctctaggccaaaacrcctgtcatgcagaaag

SEQ ID NO: 13947 - DNA, 33 bp, homo sapiens
cactgtgcagacttagkatggctaaggctattc

SEQ ID NO: 13948 - DNA, 33 bp, homo sapiens
cctgggtctgccagtcyaaatacaatgagatcc

SEQ ID NO: 13949 - DNA, 33 bp, homo sapiens
agactttgtttcttacrgagtatcattccatgg

SEQ ID NO: 13950 - DNA, 33 bp, homo sapiens
tccctagtgatcaatarggttgaatatttttca

SEQ ID NO: 13951 - DNA, 33 bp, homo sapiens
ttaattgtgtcctgaawacttaaaattgataaa

SEQ ID NO: 13952 - DNA, 33 bp, homo sapiens
gtgacttgcttggtcayccattcttgatcttcc

SEQ ID NO: 13953 - DNA, 33 bp, homo sapiens
agagaccagtcaaacaytccaaatttatcaagc

SEQ ID NO: 13954 - DNA, 33 bp, homo sapiens
agacaggatgtaacaargttaacaacaagatat

SEQ ID NO: 13955 - DNA, 33 bp, homo sapiens
ccttgagtgaactgcascagtaacaaaaccagg

SEQ ID NO: 13956 - DNA, 33 bp, homo sapiens
gaatatcatacagtgcrgcaaaggaagggcttg

SEQ ID NO: 13957 - DNA, 33 bp, homo sapiens
gccttttgcataggtgraaaacagcaaatatta

SEQ ID NO: 13958 - DNA, 33 bp, homo sapiens
aaaggaaacaggaacakgaatcttgatggagga

SEQ ID NO: 13959 - DNA, 33 bp, homo sapiens
aagctacagagtaaaaytgatgaaagtgaaaga

SEQ ID NO: 13960 - DNA, 33 bp, homo sapiens
cttacctggtttcatcyccctgttgtgtcctag

SEQ ID NO: 13961 - DNA, 33 bp, homo sapiens
tggtaataaatcacagscacgagtatgactgta

SEQ ID NO: 13962 - DNA, 33 bp, homo sapiens
gacagcagtgaaaaaarttgttgggtaagcata

SEQ ID NO: 13963 - DNA, 33 bp, homo sapiens
cgagagcgagccatcaraatgttctcaagaatt

SEQ ID NO: 13964 - DNA, 33 bp, homo sapiens
actctcagctttctacscggtcctcccgacatc

SEQ ID NO: 13965 - DNA, 33 bp, homo sapiens
ggctgtacatttgctckactcacttcagatatc

SEQ ID NO: 13966 - DNA, 33 bp, homo sapiens
tatagctgagaaaaccraggtacaatgaggtta

SEQ ID NO: 13967 - DNA, 33 bp, homo sapiens
cttatgtacaaatcaarcagttcaatttgcttg

SEQ ID NO: 13968 - DNA, 33 bp, homo sapiens
attccagtggcttcacrgagagcatattgattc

SEQ ID NO: 13969 - DNA, 33 bp, homo sapiens
ccacagcaagcctctayatgttaattttttaaa

SEQ ID NO: 13970 - DNA, 33 bp, homo sapiens
atgaatgcacttgagcraaatggccccgggagc

SEQ ID NO: 13971 - DNA, 33 bp, homo sapiens
agcaccaagacagttarccaaccagctgtggga

SEQ ID NO: 13972 - DNA, 33 bp, homo sapiens
tctcagagttcacgtamaatcatgcttttcatt

SEQ ID NO: 13973 - DNA, 33 bp, homo sapiens
aaaagttgtttcttccmatggaaaggtcattgg

SEQ ID NO: 13974 - DNA, 33 bp, homo sapiens
ttgcatattaacttaaraaggctcaaaagttaa

SEQ ID NO: 13975 - DNA, 33 bp, homo sapiens
gcagacatcacaatggrccacaataggttaaga

SEQ ID NO: 13976 - DNA, 33 bp, homo sapiens
ctatctagtttccataygttacgtcctcaatct

SEQ ID NO: 13977 - DNA, 33 bp, homo sapiens
cagaaactatatcctargtctcctcctaagttt

SEQ ID NO: 13978 - DNA, 33 bp, homo sapiens
tgactctctgacctaascctttgctactcaaag

SEQ ID NO: 13979 - DNA, 33 bp, homo sapiens
attgtggagtgattcasaggagatcaaactaat

SEQ ID NO: 13980 - DNA, 33 bp, homo sapiens
catagatgaaagcgccycatactacatccttcc

SEQ ID NO: 13981 - DNA, 33 bp, homo sapiens
ttttcaggttctccaaygattatatacacatat

SEQ ID NO: 13982 - DNA, 33 bp, homo sapiens
gcatggacctttccagracctgctgtttgcatt

SEQ ID NO: 13983 - DNA, 33 bp, homo sapiens
cctaagaatggagcccrcaactcatttcttccc

SEQ ID NO: 13984 - DNA, 33 bp, homo sapiens
taccccatcagtctccrgaaaacaaacaaaaaa

SEQ ID NO: 13985 - DNA, 33 bp, homo sapiens
caagaagaaaatgggtyacacagtgccaaatat

SEQ ID NO: 13986 - DNA, 33 bp, homo sapiens
atgggccaccaaaagarcgcactgggatgtttg

SEQ ID NO: 13987 - DNA, 33 bp, homo sapiens
aaaggttgattcgtaasatttcagaaaaggaaa

SEQ ID NO: 13988 - DNA, 33 bp, homo sapiens
taaacaataatttgacrctgcctctatttcatt

SEQ ID NO: 13989 - DNA, 33 bp, homo sapiens
tgctcctaagatttgcrcatcctactgcattca

SEQ ID NO: 13990 - DNA, 33 bp, homo sapiens
gaccttcattttcccaragtaatgtactatgtg

SEQ ID NO: 13991 - DNA, 33 bp, homo sapiens
acaaggctgtggttgckcttagttcacgggcat

SEQ ID NO: 13992 - DNA, 33 bp, homo sapiens
gaggcttccctaagaayggtcgaaaacatcagg

SEQ ID NO: 13993 - DNA, 33 bp, homo sapiens
acctcatgctttctagratctgcacctgcatca

SEQ ID NO: 13994 - DNA, 33 bp, homo sapiens
atcagtgaggggcagayggaccctgtgtgtctc

SEQ ID NO: 13995 - DNA, 33 bp, homo sapiens
cagtcttgcccctgtgkaatgcacgcaggagca

SEQ ID NO: 13996 - DNA, 33 bp, homo sapiens
agctctggaaaagaaakagactagaaggataaa

SEQ ID NO: 13997 - DNA, 33 bp, homo sapiens
ttcccacatatgcaccrcatccaatcatttgtc

SEQ ID NO: 13998 - DNA, 33 bp, homo sapiens
taggaaaaaaatctccragacatgttattgact

SEQ ID NO: 13999 - DNA, 33 bp, homo sapiens
gttgtcgaggagggttyaaaatcatttggagat

SEQ ID NO: 14000 - DNA, 33 bp, homo sapiens
gtatctgtgccttttawatattttttcttcttt

SEQ ID NO: 14001 - DNA, 33 bp, homo sapiens
agaaattctcgccatakgcacatatatagttag

SEQ ID NO: 14002 - DNA, 33 bp, homo sapiens
tttctgttatagtggcyaaagtgattttaacta

SEQ ID NO: 14003 - DNA, 33 bp, homo sapiens
catcacaagtgagaagyaaggcataaacctggc

SEQ ID NO: 14004 - DNA, 33 bp, homo sapiens
tattataagtaaatgasagataagtcaacagtg

SEQ ID NO: 14005 - DNA, 33 bp, homo sapiens
gctgagatgattgtttmaaaatggttccaagtt

SEQ ID NO: 14006 - DNA, 33 bp, homo sapiens
ggcattattattttcaygtatacggatacctga

SEQ ID NO: 14007 - DNA, 33 bp, homo sapiens
aggggccacagtgttaragctgctaaaagcaac

SEQ ID NO: 14008 - DNA, 33 bp, homo sapiens
agctccacaaaggcaasgactatggttttgggg

SEQ ID NO: 14009 - DNA, 33 bp, homo sapiens
aactacacttaaagtamcccgtaatacaaatgg

SEQ ID NO: 14010 - DNA, 33 bp, homo sapiens
ctggggaaatccaactyaggacatactgagact

SEQ ID NO: 14011 - DNA, 33 bp, homo sapiens
ttcctgagaagtctccrgaagccatgcattctg

SEQ ID NO: 14012 - DNA, 33 bp, homo sapiens
ccttcatgatatagacraagccagatcacaaat

SEQ ID NO: 14013 - DNA, 33 bp, homo sapiens
atgatatgtcctagaaragatgcacatttgtgt

SEQ ID NO: 14014 - DNA, 33 bp, homo sapiens
ttcttctaagcccaaastatcttccacatcaac

SEQ ID NO: 14015 - DNA, 33 bp, homo sapiens
actccattgatttggastaatttaaaagagtga

SEQ ID NO: 14016 - DNA, 33 bp, homo sapiens
attctccttgcttggcrccttgccaataaatgc

SEQ ID NO: 14017 - DNA, 33 bp, homo sapiens
gagtgggatcttctcartacatttgtttggtgg

SEQ ID NO: 14018 - DNA, 33 bp, homo sapiens
taatgtttcttaatgaytagtttaagagtatac

SEQ ID NO: 14019 - DNA, 33 bp, homo sapiens
agcaaaatagaaaaaartgtaccatggtttgaa

SEQ ID NO: 14020 - DNA, 33 bp, homo sapiens
atatgatgagcaaataycttttggatccttgat

SEQ ID NO: 14021 - DNA, 33 bp, homo sapiens
caagcttatatcctccrcagaagaaaacactat

SEQ ID NO: 14022 - DNA, 33 bp, homo sapiens
ttcagcacccagttcasgcaagcctcttagcaa

SEQ ID NO: 14023 - DNA, 33 bp, homo sapiens
gacttaaacggtttcayggagtactgctgtatt

SEQ ID NO: 14024 - DNA, 33 bp, homo sapiens
caacaataaaacattaygctccagaaattatgt

SEQ ID NO: 14025 - DNA, 33 bp, homo sapiens
ccaactctaactagcgraaacaagtaagcagta

SEQ ID NO: 14026 - DNA, 33 bp, homo sapiens
aatattcaggatgttarctacctctggcagtct

SEQ ID NO: 14027 - DNA, 33 bp, homo sapiens
gtcagcgctgtgaggaraggggtgtattgcagc

SEQ ID NO: 14028 - DNA, 33 bp, homo sapiens
tgcatccctttctctgkcaatcttacctttgcc

SEQ ID NO: 14029 - DNA, 33 bp, homo sapiens
tgcaatgatacttggaygtaaggcctttgggag

SEQ ID NO: 14030 - DNA, 33 bp, homo sapiens
acttgtggcctcgttawgtcatattatctcaat

SEQ ID NO: 14031 - DNA, 33 bp, homo sapiens
ccatgcatggctgcacrgagatacataataata

SEQ ID NO: 14032 - DNA, 33 bp, homo sapiens
tcagttcaacaataaarggacaaaagtaatttg

SEQ ID NO: 14033 - DNA, 33 bp, homo sapiens
caccttcaaataacacygtactgttaacgcctg

SEQ ID NO: 14034 - DNA, 33 bp, homo sapiens
aacagttggtgatggayaccttctctgattcct

SEQ ID NO: 14035 - DNA, 33 bp, homo sapiens
gaggcagtgatctggcygataaggggcactagg

SEQ ID NO: 14036 - DNA, 33 bp, homo sapiens
tactccatcatttccawcagcaaacaaatatgc

SEQ ID NO: 14037 - DNA, 33 bp, homo sapiens
gccttagcaaacagtargtgcttcaacgttgct

SEQ ID NO: 14038 - DNA, 33 bp, homo sapiens
aatctcagtcactgttyaaaaatggagctggaa

SEQ ID NO: 14039 - DNA, 33 bp, homo sapiens
gatatgaaagacggggragtagatatttaaaca

SEQ ID NO: 14040 - DNA, 33 bp, homo sapiens
cccaccataggtgctcrcttaagctgagccctt

SEQ ID NO: 14041 - DNA, 33 bp, homo sapiens
atttcaagtctcttaargaagatgaaggtaaca

SEQ ID NO: 14042 - DNA, 33 bp, homo sapiens
cgtgcttcactaatgayggcgggggaggaatta

SEQ ID NO: 14043 - DNA, 33 bp, homo sapiens
ggtagggaaaggatcargtcaggtgcatagata

SEQ ID NO: 14044 - DNA, 33 bp, homo sapiens
caagtgaaataggaaartgtacaccacgctgga

SEQ ID NO: 14045 - DNA, 33 bp, homo sapiens
ccttctgtggcctctcragaacagaagagatca

SEQ ID NO: 14046 - DNA, 33 bp, homo sapiens
tccatgctgagaaaccycactaatttcttgtta

SEQ ID NO: 14047 - DNA, 33 bp, homo sapiens
gcccgaccagatcacarcaacttttatctcctg

SEQ ID NO: 14048 - DNA, 33 bp, homo sapiens
tgtataaatggaatgaygatcaggcccgccttg

SEQ ID NO: 14049 - DNA, 33 bp, homo sapiens
taatgaaatgaaagtgrcaatcctggcatattt

SEQ ID NO: 14050 - DNA, 33 bp, homo sapiens
gcagactggaacaccaratagccaagttttgat

SEQ ID NO: 14051 - DNA, 33 bp, homo sapiens
gcctttgaatcttcacrgcttatctcctacttg

SEQ ID NO: 14052 - DNA, 33 bp, homo sapiens
tggaggcagggtgggcraaaggatcctgccctc

SEQ ID NO: 14053 - DNA, 33 bp, homo sapiens
ggaggttgtgcaaatayacacagatggtggccc

SEQ ID NO: 14054 - DNA, 33 bp, homo sapiens
aacaggaataaccaggwcatttgaacaggatcg

SEQ ID NO: 14055 - DNA, 33 bp, homo sapiens
gagtgagaacaagcgaygtttgattttttgtct

SEQ ID NO: 14056 - DNA, 33 bp, homo sapiens
taaactttatttttggyagaggatcacgagggt

SEQ ID NO: 14057 - DNA, 33 bp, homo sapiens
taaagattactgctggrcaaagctgatatatca

SEQ ID NO: 14058 - DNA, 33 bp, homo sapiens
tgggaatagacagcaartgcataccctgctctg

SEQ ID NO: 14059 - DNA, 33 bp, homo sapiens
ttagtagaagggtgtckaatgttgactttttga

SEQ ID NO: 14060 - DNA, 33 bp, homo sapiens
tgtgatgaaatcttccrgcaaggcctcttgagg

SEQ ID NO: 14061 - DNA, 33 bp, homo sapiens
aacaaaacctgggctcmaaagttctgtgtctta

SEQ ID NO: 14062 - DNA, 33 bp, homo sapiens
aaggtggtagggacaartcttaggagccccaga

SEQ ID NO: 14063 - DNA, 33 bp, homo sapiens
ttttctgtaaggattaygtgacagggctcatgt

SEQ ID NO: 14064 - DNA, 33 bp, homo sapiens
ggtcagaacttgaatgyatttgtcaccaagtaa

SEQ ID NO: 14065 - DNA, 33 bp, homo sapiens
tccaaccccagaaggargactctgtgctcctac

SEQ ID NO: 14066 - DNA, 33 bp, homo sapiens
acagccctaaagactaycacaaatacccactca

SEQ ID NO: 14067 - DNA, 33 bp, homo sapiens
atgagatccaggccacraggttcatcttcctcc

SEQ ID NO: 14068 - DNA, 33 bp, homo sapiens
gaagctgcacacaatcyaacccaacatcaattt

SEQ ID NO: 14069 - DNA, 33 bp, homo sapiens
gcaccatctccctcacyggcaccctatcaagag

SEQ ID NO: 14070 - DNA, 33 bp, homo sapiens
gcatccaagacctcaamgtcagtgtagaagaag

SEQ ID NO: 14071 - DNA, 33 bp, homo sapiens
ctaaaacaacaaatacmaggctaatggatccga

SEQ ID NO: 14072 - DNA, 33 bp, homo sapiens
tgaaagcagaacttgayggataagcagaggacc

SEQ ID NO: 14073 - DNA, 33 bp, homo sapiens
gatggaaaaggttagargcttcaggctgagaag

SEQ ID NO: 14074 - DNA, 33 bp, homo sapiens
tctctctagccaaagawctagaaaaggaacaac

SEQ ID NO: 14075 - DNA, 33 bp, homo sapiens
agcctttctgaggtccscattcactctgccact

SEQ ID NO: 14076 - DNA, 33 bp, homo sapiens
cagtattgactgacaayattagcagagcctggc

SEQ ID NO: 14077 - DNA, 33 bp, homo sapiens
gtcctatttctccaccyctccttgtatctgagc

SEQ ID NO: 14078 - DNA, 33 bp, homo sapiens
gatagcatttgatttaycctttcagtgtttatt

SEQ ID NO: 14079 - DNA, 33 bp, homo sapiens
ccacacacagctgtacyggcaagtttcaaaaac

SEQ ID NO: 14080 - DNA, 33 bp, homo sapiens
aggagccatgcttcackactctggaggtggcag

SEQ ID NO: 14081 - DNA, 33 bp, homo sapiens
taatcgaaatcatctaytaaagtcaaaaacaac

SEQ ID NO: 14082 - DNA, 33 bp, homo sapiens
tgtggaaacccaaatcrcaaggtcatctctttg

SEQ ID NO: 14083 - DNA, 33 bp, homo sapiens
ttacaggcatgagctaycaccacgccaggccga

SEQ ID NO: 14084 - DNA, 33 bp, homo sapiens
ccagagagtgaagatasattacctacacaggaa

SEQ ID NO: 14085 - DNA, 33 bp, homo sapiens
tacaaaaccaaaggcarctaaatccaactctgc

SEQ ID NO: 14086 - DNA, 33 bp, homo sapiens
aagttatttccaacacrcatattcttttcacat

SEQ ID NO: 14087 - DNA, 33 bp, homo sapiens
aggcagaagtgaaaaayattctttgaaataagt

SEQ ID NO: 14088 - DNA, 33 bp, homo sapiens
tcgtaccatttaattgmaagctctcctaatctc

SEQ ID NO: 14089 - DNA, 33 bp, homo sapiens
ggcttagttagaagccrgacatttctgatttaa

SEQ ID NO: 14090 - DNA, 33 bp, homo sapiens
tcccaggctcggggaaytgaacctttcccacac

SEQ ID NO: 14091 - DNA, 33 bp, homo sapiens
tctgttacaccttgaayctcttgccattttcta

SEQ ID NO: 14092 - DNA, 33 bp, homo sapiens
gaagtgggaagctcgcrgcctactgagaaggtg

SEQ ID NO: 14093 - DNA, 33 bp, homo sapiens
cagctgaaacctcaagragattctgggcaccgg

SEQ ID NO: 14094 - DNA, 33 bp, homo sapiens
acttagaacttgtaacracaggaaggttctaag

SEQ ID NO: 14095 - DNA, 33 bp, homo sapiens
agcacagcaactggacyatggtaagagctcagt

SEQ ID NO: 14096 - DNA, 33 bp, homo sapiens
aacactgaagcgtcatyagaattccttcagaaa

SEQ ID NO: 14097 - DNA, 33 bp, homo sapiens
ggccaccagaatatccrcactgggctgcttgag

SEQ ID NO: 14098 - DNA, 33 bp, homo sapiens
cagagcagcagcattckcttggccaggacctgc

SEQ ID NO: 14099 - DNA, 33 bp, homo sapiens
gaacgagttgagagtgsaatatgccaaatttcc

SEQ ID NO: 14100 - DNA, 33 bp, homo sapiens
tgtctatcaagtctacracacaatgctcaataa

SEQ ID NO: 14101 - DNA, 33 bp, homo sapiens
ataacaacttgggcccrcattctcacatggctg

SEQ ID NO: 14102 - DNA, 33 bp, homo sapiens
gttgattagacctaaaygaaaggaaacaaagca

SEQ ID NO: 14103 - DNA, 33 bp, homo sapiens
atccatctaaaataacmcaaaagtcagattttt

SEQ ID NO: 14104 - DNA, 33 bp, homo sapiens
gaatccagcttctaaasaatgagtcttacctcc

SEQ ID NO: 14105 - DNA, 33 bp, homo sapiens
gtctcgggtcctatcckaagagggctcattcat

SEQ ID NO: 14106 - DNA, 33 bp, homo sapiens
cagagcttgcaacctawagataaagcaccccag

SEQ ID NO: 14107 - DNA, 33 bp, homo sapiens
gaaataaataaacgtargtgcaaattagtaaga

SEQ ID NO: 14108 - DNA, 33 bp, homo sapiens
tgtatctgagggttcartctaagagttttaaaa

SEQ ID NO: 14109 - DNA, 33 bp, homo sapiens
tttttcacgagtactaygatctgagttagagag

SEQ ID NO: 14110 - DNA, 33 bp, homo sapiens
ctaaccctccgcacacraaactaatggaaaagg

SEQ ID NO: 14111 - DNA, 33 bp, homo sapiens
gaaagggaaatggcacmcaccgttcatcaggga

SEQ ID NO: 14112 - DNA, 33 bp, homo sapiens
tgttcatcaaaagataygtggccaggtgcaggg

SEQ ID NO: 14113 - DNA, 33 bp, homo sapiens
gtctggggactacctayatcagcgtgaccttgg

SEQ ID NO: 14114 - DNA, 33 bp, homo sapiens
acgctgttggctgaatraaggaggtctggagaa

SEQ ID NO: 14115 - DNA, 33 bp, homo sapiens
catcccccacatatacrcagaaactcacgggcg

SEQ ID NO: 14116 - DNA, 33 bp, homo sapiens
atggtctcttgattgasattgcccttggtcttt

SEQ ID NO: 14117 - DNA, 33 bp, homo sapiens
aaaatgcagacaatgcmaggcagagcttccacc

SEQ ID NO: 14118 - DNA, 33 bp, homo sapiens
actccgagtgtctgctracagctttgtgaggca

SEQ ID NO: 14119 - DNA, 33 bp, homo sapiens
tcaaacctgactcaaaytcttcttttctgggtg

SEQ ID NO: 14120 - DNA, 33 bp, homo sapiens
gtaagctcagagccacygaaaagacttggaggg

SEQ ID NO: 14121 - DNA, 33 bp, homo sapiens
ggctctccaaattcacrctctttgactcataca

SEQ ID NO: 14122 - DNA, 33 bp, homo sapiens
tgtaatctagatgtackccaagaaagatgtaat

SEQ ID NO: 14123 - DNA, 33 bp, homo sapiens
tagagataagaaaggcrctagcatattatctgt

SEQ ID NO: 14124 - DNA, 33 bp, homo sapiens
atcgatcacaatttcarcccatgcgagaaacac

SEQ ID NO: 14125 - DNA, 33 bp, homo sapiens
cctctgaatttccaaarccacacatattctaca

SEQ ID NO: 14126 - DNA, 33 bp, homo sapiens
ggacacatgaataaaayacaccatgagagagtc

SEQ ID NO: 14127 - DNA, 33 bp, homo sapiens
tgatgtgtttctgtctyacgggactgaaacctt

SEQ ID NO: 14128 - DNA, 33 bp, homo sapiens
tttgaactttgtataaygtagctgctagaaaag

SEQ ID NO: 14129 - DNA, 33 bp, homo sapiens
ccctgggattcttagaycctacttaaacctgtt

SEQ ID NO: 14130 - DNA, 33 bp, homo sapiens
aggagccactggggaaygattctggggaggcat

SEQ ID NO: 14131 - DNA, 33 bp, homo sapiens
tgcatcctggctgatakagcagataggaaattt

SEQ ID NO: 14132 - DNA, 33 bp, homo sapiens
tccagcaaggtgagggwcatatttagagaacca

SEQ ID NO: 14133 - DNA, 33 bp, homo sapiens
aactgtgcgaggtctasaaagaaaataacttcc

SEQ ID NO: 14134 - DNA, 33 bp, homo sapiens
cagacaactgctttgcyagcgaataattcactg

SEQ ID NO: 14135 - DNA, 33 bp, homo sapiens
aatcagatcacagttcrctcttcatttaaaacc

SEQ ID NO: 14136 - DNA, 33 bp, homo sapiens
tataagctgccatttcrctgtccctatgggtga

SEQ ID NO: 14137 - DNA, 33 bp, homo sapiens
ttttacatcctgtgaakggaactatactactgc

SEQ ID NO: 14138 - DNA, 33 bp, homo sapiens
agggaaagaaacaagaygccatgatagggaaca

SEQ ID NO: 14139 - DNA, 33 bp, homo sapiens
gtggtctccctttccaraaacttaacagctgtc

SEQ ID NO: 14140 - DNA, 33 bp, homo sapiens
caaacaccaggtattcmatcaatgctagttctt

SEQ ID NO: 14141 - DNA, 33 bp, homo sapiens
agaaagaagaaactcarcgctagtgttccattg

SEQ ID NO: 14142 - DNA, 33 bp, homo sapiens
gtttatccctgcagtgmattcttcctggaattc

SEQ ID NO: 14143 - DNA, 33 bp, homo sapiens
gaacaattggtaaacaycttcgcgctttctcaa

SEQ ID NO: 14144 - DNA, 33 bp, homo sapiens
aaacaattactgtgccyatcacacaccttgagg

SEQ ID NO: 14145 - DNA, 33 bp, homo sapiens
tctgcagcatctgctayggccaaccaactcctc

SEQ ID NO: 14146 - DNA, 33 bp, homo sapiens
tctgaatacactgatamctatcccctgccacac

SEQ ID NO: 14147 - DNA, 33 bp, homo sapiens
acagattgcctgaaacyaaaaatcctgagcagg

SEQ ID NO: 14148 - DNA, 33 bp, homo sapiens
caaggtctatctggaarcatagattcaggagac

SEQ ID NO: 14149 - DNA, 33 bp, homo sapiens
acccacccgctgtttasaactgagacagctacc

SEQ ID NO: 14150 - DNA, 33 bp, homo sapiens
cttagctcagttttagrcatgttaaatagctaa

SEQ ID NO: 14151 - DNA, 33 bp, homo sapiens
ctagcatcattaacatmacttgcaggcatgtta

SEQ ID NO: 14152 - DNA, 33 bp, homo sapiens
gctaggcaaggtgtatyagtatgagtacctgcc

SEQ ID NO: 14153 - DNA, 33 bp, homo sapiens
tctgttgcgggttaagycatcagattttggggt

SEQ ID NO: 14154 - DNA, 33 bp, homo sapiens
ataagaaccaaagcacyagcatattttcctaca

SEQ ID NO: 14155 - DNA, 33 bp, homo sapiens
tacatacacatggctamatttttaatatttttg

SEQ ID NO: 14156 - DNA, 33 bp, homo sapiens
ggtctcagtagtgagcrccttcaaactgggcaa

SEQ ID NO: 14157 - DNA, 33 bp, homo sapiens
aaaatttgctgcatgayggtggagtgagctgag

SEQ ID NO: 14158 - DNA, 33 bp, homo sapiens
ggatgttgaaagacggkagagacacaggcaaaa

SEQ ID NO: 14159 - DNA, 33 bp, homo sapiens
acccattgttgtatcartcaattgttccttcaa

SEQ ID NO: 14160 - DNA, 33 bp, homo sapiens
tgactttgagtgtgccwcttctcctctctgggg

SEQ ID NO: 14161 - DNA, 33 bp, homo sapiens
gcaaagttgagcttacrcggcatgtcattgatc

SEQ ID NO: 14162 - DNA, 33 bp, homo sapiens
ttatttgtaggataatraagcagaaagaccaag

SEQ ID NO: 14163 - DNA, 33 bp, homo sapiens
gaaactactcagaaacrgtacatggagtttgga

SEQ ID NO: 14164 - DNA, 33 bp, homo sapiens
gagtgtggccaagttamacaagcgcagggttgg

SEQ ID NO: 14165 - DNA, 33 bp, homo sapiens
taaaaggactttcaaaktatcaccatgtgatat

SEQ ID NO: 14166 - DNA, 33 bp, homo sapiens
cccctctctcgaaaggkccaatcccccagctct

SEQ ID NO: 14167 - DNA, 33 bp, homo sapiens
ctcactcagacctaacraagcataacttacagg

SEQ ID NO: 14168 - DNA, 33 bp, homo sapiens
gcaccatgatattaacmctgggactctcgaacc

SEQ ID NO: 14169 - DNA, 33 bp, homo sapiens
agtaaagtcagtagacraaagttgggcaagaat

SEQ ID NO: 14170 - DNA, 33 bp, homo sapiens
aaacacgcattgaggayaggactttggacctaa

SEQ ID NO: 14171 - DNA, 33 bp, homo sapiens
acccagttggagccccmgacttgcccctctctt

SEQ ID NO: 14172 - DNA, 33 bp, homo sapiens
cattcacaagaggttcycaccttccaagtactc

SEQ ID NO: 14173 - DNA, 33 bp, homo sapiens
cttacatacataagcargatcaacacgggcaac

SEQ ID NO: 14174 - DNA, 33 bp, homo sapiens
tgtgaatgctcacgggyatagggttgacgataa

SEQ ID NO: 14175 - DNA, 33 bp, homo sapiens
ccaaattgaaaaaatayaccctctgatggtcta

SEQ ID NO: 14176 - DNA, 33 bp, homo sapiens
cttcagggcttggcaastgaaatagctatgtgg

SEQ ID NO: 14177 - DNA, 33 bp, homo sapiens
gtttagactgattaccrgcaattcaaggagtaa

SEQ ID NO: 14178 - DNA, 33 bp, homo sapiens
ctgtaaacaagttaacrgtgaagatttaagaag

SEQ ID NO: 14179 - DNA, 33 bp, homo sapiens
gacagaatggaatgaarcaaccagaaagatagt

SEQ ID NO: 14180 - DNA, 33 bp, homo sapiens
cctagagtaagtgggakgtaggatttgagtata

SEQ ID NO: 14181 - DNA, 33 bp, homo sapiens
cagtagaatgggactayggacacctacgacctc

SEQ ID NO: 14182 - DNA, 33 bp, homo sapiens
ttatccacattttttaygattcagggaaaacta

SEQ ID NO: 14183 - DNA, 33 bp, homo sapiens
aggacttctctcccacygactgattctggcaca

SEQ ID NO: 14184 - DNA, 33 bp, homo sapiens
aaataaaagaagagtgraatgggagcttcagaa

SEQ ID NO: 14185 - DNA, 33 bp, homo sapiens
gaaagcaacagattcastaaaccctcaccagcc

SEQ ID NO: 14186 - DNA, 33 bp, homo sapiens
ccgtctagactggtgcrcaacctcctccctctc

SEQ ID NO: 14187 - DNA, 33 bp, homo sapiens
actacatttatggagckatcatctcaagcttga

SEQ ID NO: 14188 - DNA, 33 bp, homo sapiens
ccagggttctggtgcayacgggcattatggtcc

SEQ ID NO: 14189 - DNA, 33 bp, homo sapiens
ggcatgaaaatattcgycaattataggagagtt

SEQ ID NO: 14190 - DNA, 33 bp, homo sapiens
ttaatctcgcaagcacrgggagtttctgccatc

SEQ ID NO: 14191 - DNA, 33 bp, homo sapiens
cagttttccagatttcsatcccagaatgttttt

SEQ ID NO: 14192 - DNA, 33 bp, homo sapiens
aagaaagaaatgccccsggctgctttccactga

SEQ ID NO: 14193 - DNA, 33 bp, homo sapiens
agaaaattaaaatgaasaaagggagctgatatc

SEQ ID NO: 14194 - DNA, 33 bp, homo sapiens
gcaggctttgccctaartcagtttttagaacac

SEQ ID NO: 14195 - DNA, 33 bp, homo sapiens
gttgagtgagaaaaggracttgcagaagttaac

SEQ ID NO: 14196 - DNA, 33 bp, homo sapiens
aagaatgacataaaaawttgtgaggtgttcgat

SEQ ID NO: 14197 - DNA, 33 bp, homo sapiens
gaggagcttgctcaagracagggagatgcagaa

SEQ ID NO: 14198 - DNA, 33 bp, homo sapiens
tgctagcttcactctcragcaggctgtcctcta

SEQ ID NO: 14199 - DNA, 33 bp, homo sapiens
gtgaacagggttgtccrgatttgccttacccag

SEQ ID NO: 14200 - DNA, 33 bp, homo sapiens
agctctttgcattcccygactctgttatggagg

SEQ ID NO: 14201 - DNA, 33 bp, homo sapiens
agtctaaaagaggccaytccaataaccaaggat

SEQ ID NO: 14202 - DNA, 33 bp, homo sapiens
acagcacccgatgtccrcaagatgaagtcagca

SEQ ID NO: 14203 - DNA, 33 bp, homo sapiens
ctatattcctcttgcgyagaaccagtgtaacac

SEQ ID NO: 14204 - DNA, 33 bp, homo sapiens
ggacctggttgcacggyatattagctcctgcta

SEQ ID NO: 14205 - DNA, 33 bp, homo sapiens
taggagcgttataataraaagtcctcattttga

SEQ ID NO: 14206 - DNA, 33 bp, homo sapiens
gataacatggcacgtayggcgtatgcacgccca

SEQ ID NO: 14207 - DNA, 33 bp, homo sapiens
attccatcatggctgaragttctactgggcaac

SEQ ID NO: 14208 - DNA, 33 bp, homo sapiens
actaaagagcctgaaawtgtaataataccatat

SEQ ID NO: 14209 - DNA, 33 bp, homo sapiens
gtcctgcttttcttgayatgacatttgtggaag

SEQ ID NO: 14210 - DNA, 33 bp, homo sapiens
agcagttcttaatgggracaatgtgccttttcc

SEQ ID NO: 14211 - DNA, 33 bp, homo sapiens
ggaggtgagttgactakctccacataaaccctg

SEQ ID NO: 14212 - DNA, 33 bp, homo sapiens
cgtccaccacaaaaccragcatgactttgccta

SEQ ID NO: 14213 - DNA, 33 bp, homo sapiens
tctggaggtaatgtcaygtgttacagccactct

SEQ ID NO: 14214 - DNA, 33 bp, homo sapiens
aacaggattttgacacrctaagatctcccagaa

SEQ ID NO: 14215 - DNA, 33 bp, homo sapiens
cctgtggttagggatgraaagccatcttttgtg

SEQ ID NO: 14216 - DNA, 33 bp, homo sapiens
gacttgaagccttatayacagtacccgtaagtg

SEQ ID NO: 14217 - DNA, 33 bp, homo sapiens
cagactcaactcagtcratggtcctttcttcca

SEQ ID NO: 14218 - DNA, 33 bp, homo sapiens
aattttgagcctgtgargttagtagtctacgaa

SEQ ID NO: 14219 - DNA, 33 bp, homo sapiens
gagaattgcaaatgtcrcgagtgtcctgaagag

SEQ ID NO: 14220 - DNA, 33 bp, homo sapiens
agcagagtcctggaaamccagtttagacaagaa

SEQ ID NO: 14221 - DNA, 33 bp, homo sapiens
cccttgataacgacaayggtattgggcgaaatg

SEQ ID NO: 14222 - DNA, 33 bp, homo sapiens
aaataaatggacttacraagaccagctttccaa

SEQ ID NO: 14223 - DNA, 33 bp, homo sapiens
aggaagtaggtataagwcttaatcccattttgc

SEQ ID NO: 14224 - DNA, 33 bp, homo sapiens
ttctgttttcttaccayagtactaaggagggac

SEQ ID NO: 14225 - DNA, 33 bp, homo sapiens
ttctcaggaatcctcamctatgtcttccttgac

SEQ ID NO: 14226 - DNA, 33 bp, homo sapiens
aaaacatgtactccgawgtcagatggcctggat

SEQ ID NO: 14227 - DNA, 33 bp, homo sapiens
tgtaaagagtcccagtyaatcccgaggtagcaa

SEQ ID NO: 14228 - DNA, 33 bp, homo sapiens
aaagcccatgggctgaygactacggttcactct

SEQ ID NO: 14229 - DNA, 33 bp, homo sapiens
taaattgattttttgtsaaggtcaaactcttag

SEQ ID NO: 14230 - DNA, 33 bp, homo sapiens
tactgaatgttttatargagagtgtatatgatt

SEQ ID NO: 14231 - DNA, 33 bp, homo sapiens
caggatgaacctataakattcacagcactttac

SEQ ID NO: 14232 - DNA, 33 bp, homo sapiens
acccgaacagtaagaayaacaatgcaaaagaag

SEQ ID NO: 14233 - DNA, 33 bp, homo sapiens
tcagagcactaatgccraaaagaaggatcggtt

SEQ ID NO: 14234 - DNA, 33 bp, homo sapiens
ttttgcagacttacaaygtcgccttcattctac

SEQ ID NO: 14235 - DNA, 33 bp, homo sapiens
acttgaccatgatcacwaatccctacagatgtt

SEQ ID NO: 14236 - DNA, 33 bp, homo sapiens
ttgagatacagaagacraggacactcatgtagc

SEQ ID NO: 14237 - DNA, 33 bp, homo sapiens
agatatacttgcaacayggaaattggcaaatgc

SEQ ID NO: 14238 - DNA, 33 bp, homo sapiens
caccagtcagaatgacrggaacctccacaggca

SEQ ID NO: 14239 - DNA, 33 bp, homo sapiens
tctaggctgaaaaatgrcaagtacactggacta

SEQ ID NO: 14240 - DNA, 33 bp, homo sapiens
accttattatttttgaycacctttactgaggct

SEQ ID NO: 14241 - DNA, 33 bp, homo sapiens
aatccttacaagaaccscaagtggtagatatga

SEQ ID NO: 14242 - DNA, 33 bp, homo sapiens
catgtttgaaaatgctwaattgttggaagtaaa

SEQ ID NO: 14243 - DNA, 33 bp, homo sapiens
aagtgaagcatgctgamaagcaagggtcaaagt

SEQ ID NO: 14244 - DNA, 33 bp, homo sapiens
agacacttttccagaaygtccaggctctggagg

SEQ ID NO: 14245 - DNA, 33 bp, homo sapiens
ttaatcatctgacttcmacttttagtctcgtat

SEQ ID NO: 14246 - DNA, 33 bp, homo sapiens
tcagctggctgagttcyaccttattttgatgca

SEQ ID NO: 14247 - DNA, 33 bp, homo sapiens
ggaggccaaaatgatamatattctcagtgcagc

SEQ ID NO: 14248 - DNA, 33 bp, homo sapiens
cccttagctgagaacckctactctagggcagtc

SEQ ID NO: 14249 - DNA, 33 bp, homo sapiens
catcagagagctttgasaggattctccgtgtct

SEQ ID NO: 14250 - DNA, 33 bp, homo sapiens
cttcggctgaactccaycccgcttctctctgaa

SEQ ID NO: 14251 - DNA, 33 bp, homo sapiens
ataaaatcataaaactsacctctggcaaaatta

SEQ ID NO: 14252 - DNA, 33 bp, homo sapiens
acagttctaggggacgraagttcaaaatcagtt

SEQ ID NO: 14253 - DNA, 33 bp, homo sapiens
ggctaaacatgaaaackaggagaggaaacctgc

SEQ ID NO: 14254 - DNA, 33 bp, homo sapiens
tattgatgtataaaaaytccaaaaactgtgcac

SEQ ID NO: 14255 - DNA, 33 bp, homo sapiens
tgatacaatgacccaargaagggagcacaacaa

SEQ ID NO: 14256 - DNA, 33 bp, homo sapiens
cagttcttttaagtgcwaaggaaaattgatttc

SEQ ID NO: 14257 - DNA, 33 bp, homo sapiens
gaccttggatctccacrgggtaagacttcaggt

SEQ ID NO: 14258 - DNA, 33 bp, homo sapiens
ttcaatagggaagcaaraaccacagtgagagga

SEQ ID NO: 14259 - DNA, 33 bp, homo sapiens
gctgagtaactcgtccraagtccagtggtatag

SEQ ID NO: 14260 - DNA, 33 bp, homo sapiens
tagctctgtttcctacygaagggagacacgtat

SEQ ID NO: 14261 - DNA, 33 bp, homo sapiens
cttctgtaaaatctgckgacacctaaacgttgg

SEQ ID NO: 14262 - DNA, 33 bp, homo sapiens
tggacacttcgggccayggcttcactctctgct

SEQ ID NO: 14263 - DNA, 33 bp, homo sapiens
aaagtgtctgacagcasgtcaatgcttgttgtt

SEQ ID NO: 14264 - DNA, 33 bp, homo sapiens
caaaccagcatcccccrcttccatcctgtgctt

SEQ ID NO: 14265 - DNA, 33 bp, homo sapiens
gcttccagaaacttcaraacaagtggactgtga

SEQ ID NO: 14266 - DNA, 33 bp, homo sapiens
accaattctaaaccacsctttgccagttaaaac

SEQ ID NO: 14267 - DNA, 33 bp, homo sapiens
gcagattgtgaactacrcatatgagggatctgg

SEQ ID NO: 14268 - DNA, 33 bp, homo sapiens
gcctttgggagacaatyaggtttagatgagctc

SEQ ID NO: 14269 - DNA, 33 bp, homo sapiens
tgatttatgggcatgamcttccatgtgccccga

SEQ ID NO: 14270 - DNA, 33 bp, homo sapiens
agggaataggcagatasagttttcagatatcta

SEQ ID NO: 14271 - DNA, 33 bp, homo sapiens
acaaaggctggggatcraatacaactgcgcaca

SEQ ID NO: 14272 - DNA, 33 bp, homo sapiens
agagcaactttcaatayatcttctacacacaca

SEQ ID NO: 14273 - DNA, 33 bp, homo sapiens
attattgaatgaaaccrgacattcttacattat

SEQ ID NO: 14274 - DNA, 33 bp, homo sapiens
actctctggggcagaakgaaaactgctgctttg

SEQ ID NO: 14275 - DNA, 33 bp, homo sapiens
attgagaggggaatctmaagggaattctgttgt

SEQ ID NO: 14276 - DNA, 33 bp, homo sapiens
gttctcctttgctcaartaaattttctaaaaga

SEQ ID NO: 14277 - DNA, 33 bp, homo sapiens
aaaacccagggatatcragattttctgagacta

SEQ ID NO: 14278 - DNA, 33 bp, homo sapiens
gttatattgactcatgyagtttattctccaaac

SEQ ID NO: 14279 - DNA, 33 bp, homo sapiens
gaaggagcagcacactyaagggcatgaaatagg

SEQ ID NO: 14280 - DNA, 33 bp, homo sapiens
cagtaatgctggtctcrgagaaggaaagtgaat

SEQ ID NO: 14281 - DNA, 33 bp, homo sapiens
attctcaaacagattcrattggagggaggagct

SEQ ID NO: 14282 - DNA, 33 bp, homo sapiens
ggaaccacaccgtctasatggcagtggacccag

SEQ ID NO: 14283 - DNA, 33 bp, homo sapiens
gacatttcacatacacraaagtgcataaaacat

SEQ ID NO: 14284 - DNA, 33 bp, homo sapiens
aatacactgagtacaayaagccagatgcagaag

SEQ ID NO: 14285 - DNA, 33 bp, homo sapiens
agccctcagaagtcacyggccctgaggcttcag

SEQ ID NO: 14286 - DNA, 33 bp, homo sapiens
taggctgagcataaaastttatcagtatataga

SEQ ID NO: 14287 - DNA, 33 bp, homo sapiens
atacatacatattgaaygatttctaggcgtcag

SEQ ID NO: 14288 - DNA, 33 bp, homo sapiens
agacagtgtgttaatcyaggtagagtctgactg

SEQ ID NO: 14289 - DNA, 33 bp, homo sapiens
ccacagcagaggatccsccatccggctcaggcc

SEQ ID NO: 14290 - DNA, 33 bp, homo sapiens
caccatctcttctcaamgccacctgaaacacag

SEQ ID NO: 14291 - DNA, 33 bp, homo sapiens
tgctttgaattgatgaraaatgctataatgcag

SEQ ID NO: 14292 - DNA, 33 bp, homo sapiens
tctctatgtctctatcraagtggaaacaggaaa

SEQ ID NO: 14293 - DNA, 33 bp, homo sapiens
ggtcaattgttaaacasgcagaactgttagggc

SEQ ID NO: 14294 - DNA, 33 bp, homo sapiens
tgtttggttttacaacratgattcagagagaca

SEQ ID NO: 14295 - DNA, 33 bp, homo sapiens
ttccgtggtacagagaygcgggaatgctgtaga

SEQ ID NO: 14296 - DNA, 33 bp, homo sapiens
atagactgatgaatcgsattgatcggaagctct

SEQ ID NO: 14297 - DNA, 33 bp, homo sapiens
tgcactagaaaccttgragtgttttaatatcac

SEQ ID NO: 14298 - DNA, 33 bp, homo sapiens
taatgatgtttaacgckcaccttgttgcaagtt

SEQ ID NO: 14299 - DNA, 33 bp, homo sapiens
cagatgtggcctctgayagcagcgcagcatgag

SEQ ID NO: 14300 - DNA, 33 bp, homo sapiens
tgccacacttgcggcaygaggtggatttcttca

SEQ ID NO: 14301 - DNA, 33 bp, homo sapiens
gtactaatgaatgcacrctgcttcagggtttat

SEQ ID NO: 14302 - DNA, 33 bp, homo sapiens
accttgctggggtgaartgtgctcttcgtctgg

SEQ ID NO: 14303 - DNA, 33 bp, homo sapiens
tgtgccatgatcccaayttcagcctgacactgg

SEQ ID NO: 14304 - DNA, 33 bp, homo sapiens
atcctgtatttgttgaraagttcctgccggctt

SEQ ID NO: 14305 - DNA, 33 bp, homo sapiens
ggatcagatctcaatgrattagtaatggtggta

SEQ ID NO: 14306 - DNA, 33 bp, homo sapiens
acaaacacacacagctracacaatagaatatcc

SEQ ID NO: 14307 - DNA, 33 bp, homo sapiens
tcctcctaaatccaaawaagttgaacataataa

SEQ ID NO: 14308 - DNA, 33 bp, homo sapiens
tacttcttcttaaatamactctgatggctcctg

SEQ ID NO: 14309 - DNA, 33 bp, homo sapiens
cacttccaactatgtaraaagcacagtctcctc

SEQ ID NO: 14310 - DNA, 33 bp, homo sapiens
cagaataactcaataamtattagcagcaatgac

SEQ ID NO: 14311 - DNA, 33 bp, homo sapiens
tatagtctctgttgtascttgtcaattctgttg

SEQ ID NO: 14312 - DNA, 33 bp, homo sapiens
agatgctctcattcaasataaattttacagagc

SEQ ID NO: 14313 - DNA, 33 bp, homo sapiens
cttatgcataagaagasaaaagggcattttttt

SEQ ID NO: 14314 - DNA, 33 bp, homo sapiens
tcattttcttgactaamaactcagttctataaa

SEQ ID NO: 14315 - DNA, 33 bp, homo sapiens
tgatattaaggcaactracaggttatttggttc

SEQ ID NO: 14316 - DNA, 33 bp, homo sapiens
gatgatcaaaaatatawgcccagtagtgcccag

SEQ ID NO: 14317 - DNA, 33 bp, homo sapiens
aaaatagaaaaacaccraattcatttaatacag

SEQ ID NO: 14318 - DNA, 33 bp, homo sapiens
acatgctctcaagatakaggctgaatccagggg

SEQ ID NO: 14319 - DNA, 33 bp, homo sapiens
ttacaatgtgatacagkcaagccacttaatttc

SEQ ID NO: 14320 - DNA, 33 bp, homo sapiens
caacaatgacgtctacwatatttatgcaccacc

SEQ ID NO: 14321 - DNA, 33 bp, homo sapiens
cagaaagctcaagtaaraaacacgaaccctgct

SEQ ID NO: 14322 - DNA, 33 bp, homo sapiens
ttgtctccacggcaaasaatggacctcatttgt

SEQ ID NO: 14323 - DNA, 33 bp, homo sapiens
tttctgaaagagatctsaatggaagttaaatga

SEQ ID NO: 14324 - DNA, 33 bp, homo sapiens
tctagatgaatgtttaygctcttgtttcaatct

SEQ ID NO: 14325 - DNA, 33 bp, homo sapiens
attttgtccaagaggaygtatctttgactcaat

SEQ ID NO: 14326 - DNA, 33 bp, homo sapiens
catatatgtgtaaagaycaaatcaacataattg

SEQ ID NO: 14327 - DNA, 33 bp, homo sapiens
tgttggtagtaatagawtagaactttgatcata

SEQ ID NO: 14328 - DNA, 33 bp, homo sapiens
agatactgtaatttggraaagataatgtaatcc

SEQ ID NO: 14329 - DNA, 33 bp, homo sapiens
accaaaatgcccaggcraaaatatgaatatctt

SEQ ID NO: 14330 - DNA, 33 bp, homo sapiens
tgggtgggtcattgacygaatggcctagtggtg

SEQ ID NO: 14331 - DNA, 33 bp, homo sapiens
tatatctctaatgactraagcattgttaggtta

SEQ ID NO: 14332 - DNA, 33 bp, homo sapiens
agtttagcttcaagaayggcagaactacacaca

SEQ ID NO: 14333 - DNA, 33 bp, homo sapiens
gtctaattgttcatcayctcctttagagtttag

SEQ ID NO: 14334 - DNA, 33 bp, homo sapiens
acattctttcaaaaacyggaacacctggaaaca

SEQ ID NO: 14335 - DNA, 33 bp, homo sapiens
tcttttaagtgctgaaygaaaaattacttaccg

SEQ ID NO: 14336 - DNA, 33 bp, homo sapiens
ttttcagatccgaggargatttttttcagttct

SEQ ID NO: 14337 - DNA, 33 bp, homo sapiens
gattttcttccggtaarcaaataggttgtatgt

SEQ ID NO: 14338 - DNA, 33 bp, homo sapiens
aacgcaatgtataagargaggatttgttggagc

SEQ ID NO: 14339 - DNA, 33 bp, homo sapiens
cagggggaaatgttaayaggaagatggtatgag

SEQ ID NO: 14340 - DNA, 33 bp, homo sapiens
tattcactttcactagyatttcggctcttgtag

SEQ ID NO: 14341 - DNA, 33 bp, homo sapiens
ggttccttaaagaaagyctattcagttgacaat

SEQ ID NO: 14342 - DNA, 33 bp, homo sapiens
ggctgtcctagtcagawtaaacccttgctcacc

SEQ ID NO: 14343 - DNA, 33 bp, homo sapiens
tgaggtcatctctacakctttaataccctaagc

SEQ ID NO: 14344 - DNA, 33 bp, homo sapiens
taatgttcttatgtccrcattgaaggatagcta

SEQ ID NO: 14345 - DNA, 33 bp, homo sapiens
gaaagagagccctttcracaggatgattccaat

SEQ ID NO: 14346 - DNA, 33 bp, homo sapiens
atgatacaaatatccaraagtgtttatgagtgt

SEQ ID NO: 14347 - DNA, 33 bp, homo sapiens
cagttgtagtggccacrggatccatgctggagc

SEQ ID NO: 14348 - DNA, 33 bp, homo sapiens
ttggcaatttttgagaygatcggaggatggaat

SEQ ID NO: 14349 - DNA, 33 bp, homo sapiens
cagtgtccttggctaasactaattctcaatcta

SEQ ID NO: 14350 - DNA, 33 bp, homo sapiens
gatctagaagtggtcayagaatttcagcagagt

SEQ ID NO: 14351 - DNA, 33 bp, homo sapiens
tagctcttataatatgycaggtacagttctaaa

SEQ ID NO: 14352 - DNA, 33 bp, homo sapiens
ctatgatttttattacragtattttcagacaca

SEQ ID NO: 14353 - DNA, 33 bp, homo sapiens
tgtgcaggtgttccaayaagttgactgccactt

SEQ ID NO: 14354 - DNA, 33 bp, homo sapiens
gtcatttgggctactaygaaaaacatttattct

SEQ ID NO: 14355 - DNA, 33 bp, homo sapiens
gaatttcagagtatcargtagtaaaatgttgaa

SEQ ID NO: 14356 - DNA, 33 bp, homo sapiens
cctttgcttgactatgyatcctttctagtacag

SEQ ID NO: 14357 - DNA, 33 bp, homo sapiens
caaatttattattccayctatttgacccctcaa

SEQ ID NO: 14358 - DNA, 33 bp, homo sapiens
tcccctcatatcttacrgcattttctctttgtc

SEQ ID NO: 14359 - DNA, 33 bp, homo sapiens
tgctcctttctttgtgwcaaatatatccatatt

SEQ ID NO: 14360 - DNA, 33 bp, homo sapiens
acaagtgtattattacygatgcttggatggtaa

SEQ ID NO: 14361 - DNA, 33 bp, homo sapiens
agtgctgtgtaaattcrgaaaggtgattaaaac

SEQ ID NO: 14362 - DNA, 33 bp, homo sapiens
tgttaacactgtggaaracacaactacaacatt

SEQ ID NO: 14363 - DNA, 33 bp, homo sapiens
agtttttaggcaaaatkactcattagcatttaa

SEQ ID NO: 14364 - DNA, 33 bp, homo sapiens
gaccttcaattgagggraatatctatgaagaga

SEQ ID NO: 14365 - DNA, 33 bp, homo sapiens
ataataacctgatagaygaaaattatggaatgg

SEQ ID NO: 14366 - DNA, 33 bp, homo sapiens
gagagcagcagtgacamtgaattaattgcacag

SEQ ID NO: 14367 - DNA, 33 bp, homo sapiens
gaaagtgtgctatatgmaataccggatactgaa

SEQ ID NO: 14368 - DNA, 33 bp, homo sapiens
cacagctacagtctgarctatggtataagtaga

SEQ ID NO: 14369 - DNA, 33 bp, homo sapiens
ttcattccgagagatamtacaggcttaaggagt

SEQ ID NO: 14370 - DNA, 33 bp, homo sapiens
cattttgcttatctcayggtatttctaattcat

SEQ ID NO: 14371 - DNA, 33 bp, homo sapiens
agaggattttcgatgawgtgaatggcaggaata

SEQ ID NO: 14372 - DNA, 33 bp, homo sapiens
tttcagattaaagcagragaaatgaaaagtagt

SEQ ID NO: 14373 - DNA, 33 bp, homo sapiens
aaggatatttggataaygaagggtgagaagtga

SEQ ID NO: 14374 - DNA, 33 bp, homo sapiens
tatacaaatgttaaacmctggcgaacacaatct

SEQ ID NO: 14375 - DNA, 33 bp, homo sapiens
aaatgaagtaaagagaratgttaggtgaatact

SEQ ID NO: 14376 - DNA, 33 bp, homo sapiens
tttttctgcaaaattaygtgattcacaactaca

SEQ ID NO: 14377 - DNA, 33 bp, homo sapiens
caaaatacaatcgaaarctttatcagtaaaaca

SEQ ID NO: 14378 - DNA, 33 bp, homo sapiens
aatataaaatgcagtcmatgtaaataaataaaa

SEQ ID NO: 14379 - DNA, 33 bp, homo sapiens
cagggtgttcttgccarattggatgacaacaag

SEQ ID NO: 14380 - DNA, 33 bp, homo sapiens
aaatagaagattctagracccaataaggaaagc

SEQ ID NO: 14381 - DNA, 33 bp, homo sapiens
gtgatcactttacacascggatttcctttaatc

SEQ ID NO: 14382 - DNA, 33 bp, homo sapiens
agggtacaattgacaarcactcttgtaagggga

SEQ ID NO: 14383 - DNA, 33 bp, homo sapiens
accctaatgactggaamgaccatacttatttta

SEQ ID NO: 14384 - DNA, 33 bp, homo sapiens
gtttctgtaatacctcrattagaaagcatgatt

SEQ ID NO: 14385 - DNA, 33 bp, homo sapiens
cagaaaatgaatttaartagcagctcaacagag

SEQ ID NO: 14386 - DNA, 33 bp, homo sapiens
ttttcaagtagtggtasactccataggtgaaag

SEQ ID NO: 14387 - DNA, 33 bp, homo sapiens
atagaaagtggctgaartcattggttacattct

SEQ ID NO: 14388 - DNA, 33 bp, homo sapiens
cagcatttccttgataytaaagcccaaggtacc

SEQ ID NO: 14389 - DNA, 33 bp, homo sapiens
ttttcttaaacttacawtcaactatagcagaag

SEQ ID NO: 14390 - DNA, 33 bp, homo sapiens
tcttcttcagaacacawctgtcactatcacatg

SEQ ID NO: 14391 - DNA, 33 bp, homo sapiens
gcatgggtcgaaaaaawtctactagccaggaat

SEQ ID NO: 14392 - DNA, 33 bp, homo sapiens
aaattagaaaagggtcraaaggatgcaggaagc

SEQ ID NO: 14393 - DNA, 33 bp, homo sapiens
atagagaaagtagggcrcattgacaaattttgt

SEQ ID NO: 14394 - DNA, 33 bp, homo sapiens
acccccagttcaagtasatgtgaatttatttga

SEQ ID NO: 14395 - DNA, 33 bp, homo sapiens
gaaattctaaccactamggtgacggtattacaa

SEQ ID NO: 14396 - DNA, 33 bp, homo sapiens
atgcaaataggtcttcmcaggatgctattaaaa

SEQ ID NO: 14397 - DNA, 33 bp, homo sapiens
atatgtatgtaaaggaraatcttcagcattctt

SEQ ID NO: 14398 - DNA, 33 bp, homo sapiens
ttaataagtagtgaaayggtgcaaatgtgcaaa

SEQ ID NO: 14399 - DNA, 33 bp, homo sapiens
tgtgcatgaaagtgtayaatccacagagtaaaa

SEQ ID NO: 14400 - DNA, 33 bp, homo sapiens
cccttaaggaagaaagwccaatggtagttattg

SEQ ID NO: 14401 - DNA, 33 bp, homo sapiens
caattgcaactcagaartgccaaatattattct

SEQ ID NO: 14402 - DNA, 33 bp, homo sapiens
ttagccaaaaggctgaraagcgatcaagtataa

SEQ ID NO: 14403 - DNA, 33 bp, homo sapiens
ctcttgatttgactcaygcatttacttgttgaa

SEQ ID NO: 14404 - DNA, 33 bp, homo sapiens
gactgaggtactgtatraacatcaatgaaatca

SEQ ID NO: 14405 - DNA, 33 bp, homo sapiens
ttggcttgggaatgtaragtcaccaggaagggt

SEQ ID NO: 14406 - DNA, 33 bp, homo sapiens
atatattttaggtaaaygaaagctgagaagata

SEQ ID NO: 14407 - DNA, 33 bp, homo sapiens
atggcatagccaaaaaktcaatggtagaagtaa

SEQ ID NO: 14408 - DNA, 33 bp, homo sapiens
tggaattgtgaacttargggagatgatgtaagg

SEQ ID NO: 14409 - DNA, 33 bp, homo sapiens
ctctcaggtgaaatagmagaattaatataaatc

SEQ ID NO: 14410 - DNA, 33 bp, homo sapiens
tgaagaaactggacacsagtgtaagcgtgaaac

SEQ ID NO: 14411 - DNA, 33 bp, homo sapiens
tactatgagtaataaarttccttgtctctgacc

SEQ ID NO: 14412 - DNA, 33 bp, homo sapiens
ttctctttcatagctakctgttttatagattgg

SEQ ID NO: 14413 - DNA, 33 bp, homo sapiens
ttgatggcatttagggraatttttagcactgaa

SEQ ID NO: 14414 - DNA, 33 bp, homo sapiens
catatatgtttttttcmacactgaactctaagg

SEQ ID NO: 14415 - DNA, 33 bp, homo sapiens
gttgcctacaatgaacwagggaaactattttta

SEQ ID NO: 14416 - DNA, 33 bp, homo sapiens
gcaaaagaaattatccrcaaagcatcatggaga

SEQ ID NO: 14417 - DNA, 33 bp, homo sapiens
atatacagtacacatayagatacagcacagata

SEQ ID NO: 14418 - DNA, 33 bp, homo sapiens
aatggagaagatgcatyaagagataagtcatgg

SEQ ID NO: 14419 - DNA, 33 bp, homo sapiens
tattggagtaagattgyagttagattaacacct

SEQ ID NO: 14420 - DNA, 33 bp, homo sapiens
gtgtagaagcagcacarctttatggttaacggc

SEQ ID NO: 14421 - DNA, 33 bp, homo sapiens
tactcttgcagactggraccattatgaagtata

SEQ ID NO: 14422 - DNA, 33 bp, homo sapiens
gaagacactaaagagayggcttatccagttttc

SEQ ID NO: 14423 - DNA, 33 bp, homo sapiens
gagaaagacgatacaaygatgcattactgagct

SEQ ID NO: 14424 - DNA, 33 bp, homo sapiens
atgaatgtagtttaaaktgccttagtttatgac

SEQ ID NO: 14425 - DNA, 33 bp, homo sapiens
tacaaaaatggttgtcrctttggggattaaaag

SEQ ID NO: 14426 - DNA, 33 bp, homo sapiens
tgtggcctacatcaaasagtttctgtcagaaac

SEQ ID NO: 14427 - DNA, 33 bp, homo sapiens
tggatttcttctccaakgtgctcagttattttt

SEQ ID NO: 14428 - DNA, 33 bp, homo sapiens
gacctcagagataccaygtgaaaggaggtttcc

SEQ ID NO: 14429 - DNA, 33 bp, homo sapiens
aaaccaggttcactttraaaaagatcaaggcat

SEQ ID NO: 14430 - DNA, 33 bp, homo sapiens
aagttaggtgccatacrataaactcagaggcta

SEQ ID NO: 14431 - DNA, 33 bp, homo sapiens
aatgggcaaaataccaraattatcagaatcact

SEQ ID NO: 14432 - DNA, 33 bp, homo sapiens
ggatggaagatactccygaagaaatgctgaaag

SEQ ID NO: 14433 - DNA, 33 bp, homo sapiens
acacttggtcttgccakgaactgactggacggc

SEQ ID NO: 14434 - DNA, 33 bp, homo sapiens
cttggaaaaagggactraaccaagtcattatgg

SEQ ID NO: 14435 - DNA, 33 bp, homo sapiens
ttatcaatgtgattatmaattgccaacctctat

SEQ ID NO: 14436 - DNA, 33 bp, homo sapiens
tcagattgtgagcaaaycagggtgtggcccagg

SEQ ID NO: 14437 - DNA, 33 bp, homo sapiens
gagtgtttgcatttgarggcttagttctactcg

SEQ ID NO: 14438 - DNA, 33 bp, homo sapiens
tcaacaggataagctaygtaaaatgttcggccc

SEQ ID NO: 14439 - DNA, 33 bp, homo sapiens
gcaactccaacgtagcyatagggttagcaccag

SEQ ID NO: 14440 - DNA, 33 bp, homo sapiens
gctcaaaagcagccacmgatattacataatgca

SEQ ID NO: 14441 - DNA, 33 bp, homo sapiens
caaacaattgctgaagractgcatatatcttct

SEQ ID NO: 14442 - DNA, 33 bp, homo sapiens
gtgttaactcaaagtaygtgatagaaaatctgt

SEQ ID NO: 14443 - DNA, 33 bp, homo sapiens
ttttgttcacagtggcraatgttatatgtcaag

SEQ ID NO: 14444 - DNA, 33 bp, homo sapiens
tgaagaaatctggaaayctagtaccgcggcacc

SEQ ID NO: 14445 - DNA, 33 bp, homo sapiens
tctccctgtgtccctamgtggtctttcctcagt

SEQ ID NO: 14446 - DNA, 33 bp, homo sapiens
ataagctgaaagagacrctcaggagagccctga

SEQ ID NO: 14447 - DNA, 33 bp, homo sapiens
gacctcaaactttcagycattatggtcaatcat

SEQ ID NO: 14448 - DNA, 33 bp, homo sapiens
tcaccactaacctcaaytctaccttatccctaa

SEQ ID NO: 14449 - DNA, 33 bp, homo sapiens
atggttctggtggggarcacctttgcctgctta

SEQ ID NO: 14450 - DNA, 33 bp, homo sapiens
ctaggtctacacagcckcaaactgcattcagta

SEQ ID NO: 14451 - DNA, 33 bp, homo sapiens
ttgcttttcaaaacaasgtttgctcttccctga

SEQ ID NO: 14452 - DNA, 33 bp, homo sapiens
aaaagtaaacgattagraacaaaattagtgtct

SEQ ID NO: 14453 - DNA, 33 bp, homo sapiens
gaagtgttgaaaactamctattggacactgttt

SEQ ID NO: 14454 - DNA, 33 bp, homo sapiens
atgtatatttgcccccragtctaaaggataagt

SEQ ID NO: 14455 - DNA, 33 bp, homo sapiens
agtaatcagaaaggtawgtttcaaggaatgttg

SEQ ID NO: 14456 - DNA, 33 bp, homo sapiens
gatgggctcctgcgtcmacgggcaagtaaacat

SEQ ID NO: 14457 - DNA, 33 bp, homo sapiens
gagatccttcttcatgmatggcaaggagaattc

SEQ ID NO: 14458 - DNA, 33 bp, homo sapiens
aagttaaccaagacacrggagttggaaaggcgc

SEQ ID NO: 14459 - DNA, 33 bp, homo sapiens
cccaagtggtctcccasaattctaagtaagaat

SEQ ID NO: 14460 - DNA, 33 bp, homo sapiens
gcaaggggaataacaastaccggcagaggcata

SEQ ID NO: 14461 - DNA, 33 bp, homo sapiens
aaagctctaatccattwaaaaacaggtaccaat

SEQ ID NO: 14462 - DNA, 33 bp, homo sapiens
ccactatattcccagaraggctgccatagatct

SEQ ID NO: 14463 - DNA, 33 bp, homo sapiens
ttttattacccaagtarccggtatttcagctca

SEQ ID NO: 14464 - DNA, 33 bp, homo sapiens
ctacctttaaaataaargacaggcatctatgta

SEQ ID NO: 14465 - DNA, 33 bp, homo sapiens
gggaacagcagataagraagcgcagggccgtgg

SEQ ID NO: 14466 - DNA, 33 bp, homo sapiens
gccatgcactactttakctgcaaggcctttgct

SEQ ID NO: 14467 - DNA, 33 bp, homo sapiens
ttttatactttgatcawggtgaatccatacaca

SEQ ID NO: 14468 - DNA, 33 bp, homo sapiens
agatggcaaaacccacsaccaatatgctgatat

SEQ ID NO: 14469 - DNA, 33 bp, homo sapiens
tcctttccttggtcaartgtaaaagcaacagct

SEQ ID NO: 14470 - DNA, 33 bp, homo sapiens
aagaacaagtatatgtraagtaaaccctgacat

SEQ ID NO: 14471 - DNA, 33 bp, homo sapiens
ctgtggcttgggattcrctagccctgagcctga

SEQ ID NO: 14472 - DNA, 33 bp, homo sapiens
agggagagataagatcraatgttaggatggact

SEQ ID NO: 14473 - DNA, 33 bp, homo sapiens
ttctagcaggacaggamacaattcaccaatggc

SEQ ID NO: 14474 - DNA, 33 bp, homo sapiens
gtggggactcaggggascatctaagtagactct

SEQ ID NO: 14475 - DNA, 33 bp, homo sapiens
atgtgtctcatccctaytacctgcttcagatat

SEQ ID NO: 14476 - DNA, 33 bp, homo sapiens
tcacagtgtatgaaacraatgttagttactcca

SEQ ID NO: 14477 - DNA, 33 bp, homo sapiens
acagacaagcctgtcgractttgaaaccaactt

SEQ ID NO: 14478 - DNA, 33 bp, homo sapiens
ccttatgcctctcagcmgaactttaggggtcaa

SEQ ID NO: 14479 - DNA, 33 bp, homo sapiens
aatctgaggcttgtgawccactgtattagtcag

SEQ ID NO: 14480 - DNA, 33 bp, homo sapiens
catcatttataaagaasaggtttaactagttcc

SEQ ID NO: 14481 - DNA, 33 bp, homo sapiens
tgacattacgatgacaytatgatcacaccatgc

SEQ ID NO: 14482 - DNA, 33 bp, homo sapiens
gtaaatccaacaatcargactgtaattttacca

SEQ ID NO: 14483 - DNA, 33 bp, homo sapiens
atgttattctttgctayacaacgtaaggataaa

SEQ ID NO: 14484 - DNA, 33 bp, homo sapiens
caccacaaatgtaaaaytgcatggttctttttt

SEQ ID NO: 14485 - DNA, 33 bp, homo sapiens
taggctcacccaacaasaagaagttatttgtat

SEQ ID NO: 14486 - DNA, 33 bp, homo sapiens
aaaaaataggctagacwgattaataggtctgtg

SEQ ID NO: 14487 - DNA, 33 bp, homo sapiens
agaggtcaagtatggartagtaaatactctctg

SEQ ID NO: 14488 - DNA, 33 bp, homo sapiens
aaccacatggagttacyctgtgactcaataata

SEQ ID NO: 14489 - DNA, 33 bp, homo sapiens
ccagagtaggaggctcyatacaaagcaggatgg

SEQ ID NO: 14490 - DNA, 33 bp, homo sapiens
gtgtaaaaggtactgaraccaaagtgtttgaga

SEQ ID NO: 14491 - DNA, 33 bp, homo sapiens
cattaagtggcaaaaaycaagctgtgtgctcta

SEQ ID NO: 14492 - DNA, 33 bp, homo sapiens
ctatgtctgcaaaggcraggaaatgaagcagaa

SEQ ID NO: 14493 - DNA, 33 bp, homo sapiens
tttggatcacaaaagamccaagtcaggtacatt

SEQ ID NO: 14494 - DNA, 33 bp, homo sapiens
gtatttgtaaggagaaraggcccagagtaccca

SEQ ID NO: 14495 - DNA, 33 bp, homo sapiens
tttacatttggactagmagtaagggctttcaaa

SEQ ID NO: 14496 - DNA, 33 bp, homo sapiens
tattacatcctggaccrctggatgcacctcacc

SEQ ID NO: 14497 - DNA, 33 bp, homo sapiens
catcattgcacttgacrcagtccactcaggggt

SEQ ID NO: 14498 - DNA, 33 bp, homo sapiens
attccagctaattgagrcatcattacaacctat

SEQ ID NO: 14499 - DNA, 33 bp, homo sapiens
ttggaatacaaggaaakaaattgtgtcctgcat

SEQ ID NO: 14500 - DNA, 33 bp, homo sapiens
agaatgacaacacttaygtgaacacatttaatg

SEQ ID NO: 14501 - DNA, 33 bp, homo sapiens
caccaacactatttcaracaagatctggttaaa

SEQ ID NO: 14502 - DNA, 33 bp, homo sapiens
ttttgttcttagtcaaytgtttaagtgaatgtt

SEQ ID NO: 14503 - DNA, 33 bp, homo sapiens
gcttgatatctctcccracattaaaatagcacc

SEQ ID NO: 14504 - DNA, 33 bp, homo sapiens
gactgtgcccttctcayctgaatctgacagtga

SEQ ID NO: 14505 - DNA, 33 bp, homo sapiens
gtagaatgacctatgamggtttggggattcaca

SEQ ID NO: 14506 - DNA, 33 bp, homo sapiens
ttcctttaaggttgtaycaagacaggaagacat

SEQ ID NO: 14507 - DNA, 33 bp, homo sapiens
agcagaagaatactgartaacacagaaaaaaat

SEQ ID NO: 14508 - DNA, 33 bp, homo sapiens
atcttgtgtgcctggaracattctgaaaggggc

SEQ ID NO: 14509 - DNA, 33 bp, homo sapiens
ccagggactgaggtcasatttgtcccaagttag

SEQ ID NO: 14510 - DNA, 33 bp, homo sapiens
ctgattttccctctgaygccatagaaaggcatt

SEQ ID NO: 14511 - DNA, 33 bp, homo sapiens
tctactttgaatgtcamactctcctagggtgaa

SEQ ID NO: 14512 - DNA, 33 bp, homo sapiens
acactaaatctttcacraaagctaggagtagaa

SEQ ID NO: 14513 - DNA, 33 bp, homo sapiens
tagctctgtctggtcarcatggtcaagtgccat

SEQ ID NO: 14514 - DNA, 33 bp, homo sapiens
atacttcatataagcgsaatcatacactatttg

SEQ ID NO: 14515 - DNA, 33 bp, homo sapiens
cactagcaaaattttcrcttgctgtttctgtga

SEQ ID NO: 14516 - DNA, 33 bp, homo sapiens
ccatctttgacatatayagcctttcattcaaaa

SEQ ID NO: 14517 - DNA, 33 bp, homo sapiens
aaaatgtgttgccaaayggtgagataaatagag

SEQ ID NO: 14518 - DNA, 33 bp, homo sapiens
gggctgtttatagacamcgaattcaccatcgaa

SEQ ID NO: 14519 - DNA, 33 bp, homo sapiens
gactccttacggcataygtgtttctgcctgttt

SEQ ID NO: 14520 - DNA, 33 bp, homo sapiens
aaatcacaactgctgaygatcacgagataatcc

SEQ ID NO: 14521 - DNA, 33 bp, homo sapiens
aacactctcatgacaascttacggcctgcctgt

SEQ ID NO: 14522 - DNA, 33 bp, homo sapiens
ttgccacgaatctcaaygtccccactggttgca

SEQ ID NO: 14523 - DNA, 33 bp, homo sapiens
ggccctgtagggaccayagttgatctagacctc

SEQ ID NO: 14524 - DNA, 33 bp, homo sapiens
ctgctgtgtcatcccgyagcagcaggtggaaga

SEQ ID NO: 14525 - DNA, 33 bp, homo sapiens
gaacgagaattcagggragttggcacaaaactt

SEQ ID NO: 14526 - DNA, 33 bp, homo sapiens
gcattcatggactgtawcttagctctgttgaaa

SEQ ID NO: 14527 - DNA, 33 bp, homo sapiens
actgacactcgaaaaarcaaatatataatacaa

SEQ ID NO: 14528 - DNA, 33 bp, homo sapiens
aactgagagctcaacasaagtgcagttccacct

SEQ ID NO: 14529 - DNA, 33 bp, homo sapiens
acttgtctcccagaacraactcttctgttgctt

SEQ ID NO: 14530 - DNA, 33 bp, homo sapiens
gcctcaataattaaaayagcacagtaccggctt

SEQ ID NO: 14531 - DNA, 33 bp, homo sapiens
gggagttctcagcttgkacccttatctccccag

SEQ ID NO: 14532 - DNA, 33 bp, homo sapiens
aaagatgttttggtccrcatttactcacctttg

SEQ ID NO: 14533 - DNA, 33 bp, homo sapiens
atagaaaagtagggaakaattctgcagctcatt

SEQ ID NO: 14534 - DNA, 33 bp, homo sapiens
aacacaaaaacagcccycctcatacgtacacac

SEQ ID NO: 14535 - DNA, 33 bp, homo sapiens
tcagtattcaccagaarcactgccatgctgttc

SEQ ID NO: 14536 - DNA, 33 bp, homo sapiens
gctactgggaggagtcrctgagagcttcgttac

SEQ ID NO: 14537 - DNA, 33 bp, homo sapiens
gactgggcactctgcamataacgccgctcctcg

SEQ ID NO: 14538 - DNA, 33 bp, homo sapiens
acctccccaccaaatcraagcacaaccaggaca

SEQ ID NO: 14539 - DNA, 33 bp, homo sapiens
atcggaacccgagaaaygctcacagtctccatg

SEQ ID NO: 14540 - DNA, 33 bp, homo sapiens
atataaacacatgaaartaccaagaggagaaga

SEQ ID NO: 14541 - DNA, 33 bp, homo sapiens
agtgtcttttataataygtatcactggcaaaaa

SEQ ID NO: 14542 - DNA, 33 bp, homo sapiens
cataatatgtaacccayctgtttctttctgtgc

SEQ ID NO: 14543 - DNA, 33 bp, homo sapiens
ataaatgtgctagttayataatagtgttcttgg

SEQ ID NO: 14544 - DNA, 33 bp, homo sapiens
ttggcttctaaagaaasgaagagaaagcagccc

SEQ ID NO: 14545 - DNA, 33 bp, homo sapiens
ggttctggttaataaarttcactgttgtgtgaa

SEQ ID NO: 14546 - DNA, 33 bp, homo sapiens
gggagtgggacttctgragcaaagataaaagaa

SEQ ID NO: 14547 - DNA, 33 bp, homo sapiens
catgtttctggtcaccrctgctctttcctcact

SEQ ID NO: 14548 - DNA, 33 bp, homo sapiens
ggcatggccaagtccaygaggttgtgcctccag

SEQ ID NO: 14549 - DNA, 33 bp, homo sapiens
tcccccccgggaagacratagaggtgacacagg

SEQ ID NO: 14550 - DNA, 33 bp, homo sapiens
gtatccacttgggtccygaagttcatctaagac

SEQ ID NO: 14551 - DNA, 33 bp, homo sapiens
ccatgtatccctttacrcacatatacgcacacc

SEQ ID NO: 14552 - DNA, 33 bp, homo sapiens
ttactgtgtgacccaartgagtcttgtcctggt

SEQ ID NO: 14553 - DNA, 33 bp, homo sapiens
tctcaatttaaaacaaragagaaccagactgag

SEQ ID NO: 14554 - DNA, 33 bp, homo sapiens
cctgctctgtcacttascagctattgacggcag

SEQ ID NO: 14555 - DNA, 33 bp, homo sapiens
gtgtgtgagacactcartaacggcaagaggatg

SEQ ID NO: 14556 - DNA, 33 bp, homo sapiens
gaaagacaccaagtcckctggtagtgctcaagt

SEQ ID NO: 14557 - DNA, 33 bp, homo sapiens
tttttcctggccccaawttcctccagcctgtcc

SEQ ID NO: 14558 - DNA, 33 bp, homo sapiens
ccactggggtcaacagrataacatttaagtcaa

SEQ ID NO: 14559 - DNA, 33 bp, homo sapiens
agcaatcaatccccaayaccgtggacgtgcttg

SEQ ID NO: 14560 - DNA, 33 bp, homo sapiens
agcatttcgtttaagcrccaaagtttcagattt

SEQ ID NO: 14561 - DNA, 33 bp, homo sapiens
ttgccttttatgcgcayctatgtgcactagctt

SEQ ID NO: 14562 - DNA, 33 bp, homo sapiens
accatagcacctggtckaagtccagcataatcc

SEQ ID NO: 14563 - DNA, 33 bp, homo sapiens
atgaacccacatggackattatccctcagagtc

SEQ ID NO: 14564 - DNA, 33 bp, homo sapiens
acaattccaccagcaaygtccaaagcttccaat

SEQ ID NO: 14565 - DNA, 33 bp, homo sapiens
ttgcacgaaggtgctayattggccggcagctgc

SEQ ID NO: 14566 - DNA, 33 bp, homo sapiens
tgcttgagaggggaaaytgccggtatgaaaaac

SEQ ID NO: 14567 - DNA, 33 bp, homo sapiens
tctaccagaacagatcmaatacctcactaatta

SEQ ID NO: 14568 - DNA, 33 bp, homo sapiens
agggaaagccaggagamtatgactccctggaag

SEQ ID NO: 14569 - DNA, 33 bp, homo sapiens
tatacaaacaactagayatacacacacatgcac

SEQ ID NO: 14570 - DNA, 33 bp, homo sapiens
tcaatcacactttcccrctgagtttagaagcag

SEQ ID NO: 14571 - DNA, 33 bp, homo sapiens
atcccactgagataacrgggcagtaattaggag

SEQ ID NO: 14572 - DNA, 33 bp, homo sapiens
gtccccaggagaagtaygtggaggaacttgcag

SEQ ID NO: 14573 - DNA, 33 bp, homo sapiens
tgggtttcccagtgaaygtggccccagcccggc

SEQ ID NO: 14574 - DNA, 33 bp, homo sapiens
agggaaaaacatcagamgcccagcagggaggaa

SEQ ID NO: 14575 - DNA, 33 bp, homo sapiens
caaagaatgagatgaayttatgcatactggtaa

SEQ ID NO: 14576 - DNA, 33 bp, homo sapiens
gagagtgatggggagasatcagagggaagtcag

SEQ ID NO: 14577 - DNA, 33 bp, homo sapiens
tactccaatgcgatgcycctaactcagctgaga

SEQ ID NO: 14578 - DNA, 33 bp, homo sapiens
cttgatacttggcggasagcactgttgttattc

SEQ ID NO: 14579 - DNA, 33 bp, homo sapiens
aagactggagttagacrgcctttgtttgcatct

SEQ ID NO: 14580 - DNA, 33 bp, homo sapiens
caaaagcagttaagaawttctggaataagtccc

SEQ ID NO: 14581 - DNA, 33 bp, homo sapiens
agcaaaagcagtcatasaatggcctggagttga

SEQ ID NO: 14582 - DNA, 33 bp, homo sapiens
caaatatagtcaatcayccccagagactttcag

SEQ ID NO: 14583 - DNA, 33 bp, homo sapiens
caaagtttaggccagawgtctctgggttcaaat

SEQ ID NO: 14584 - DNA, 33 bp, homo sapiens
cttctccccttaatgayggaaacccatgcattc

SEQ ID NO: 14585 - DNA, 33 bp, homo sapiens
ttctacctactaaaacraaaagaatgattgtaa

SEQ ID NO: 14586 - DNA, 33 bp, homo sapiens
ttttttactctgggtaygaatctttgccacttg

SEQ ID NO: 14587 - DNA, 33 bp, homo sapiens
atcatcatggtatttaygatagtgagttctttg

SEQ ID NO: 14588 - DNA, 33 bp, homo sapiens
caatttccccaggatcrcacagctcaaagatgg

SEQ ID NO: 14589 - DNA, 33 bp, homo sapiens
taataatatattggcckaagtggttggtattag

SEQ ID NO: 14590 - DNA, 33 bp, homo sapiens
tacccactaggaggaastggcaactaaataaac

SEQ ID NO: 14591 - DNA, 33 bp, homo sapiens
aatagtgttgaattcaygactccaccactgaaa

SEQ ID NO: 14592 - DNA, 33 bp, homo sapiens
tagagcattcagcttaygcaaaacaccgtgaat

SEQ ID NO: 14593 - DNA, 33 bp, homo sapiens
tgtttttgttcatgtaygtgcaagggcccttgt

SEQ ID NO: 14594 - DNA, 33 bp, homo sapiens
agaattactcaacctcyagtatcatagaaaaga

SEQ ID NO: 14595 - DNA, 33 bp, homo sapiens
tgttctaagctatttcwcctatgtcaataaaac

SEQ ID NO: 14596 - DNA, 33 bp, homo sapiens
gctcaaactcataggayggttggtagcatttca

SEQ ID NO: 14597 - DNA, 33 bp, homo sapiens
tacatacctttgctaaygctctagggcccttgt

SEQ ID NO: 14598 - DNA, 33 bp, homo sapiens
ccttggtgttgaaggayggcaaaggagaagggc

SEQ ID NO: 14599 - DNA, 33 bp, homo sapiens
agaagagtactgaaaaygaggacaaatacaatg

SEQ ID NO: 14600 - DNA, 33 bp, homo sapiens
cacttgctagaggtaaytgactcaccaccttta

SEQ ID NO: 14601 - DNA, 33 bp, homo sapiens
gggtctggagtaaaaaygccagagctcaagccc

SEQ ID NO: 14602 - DNA, 33 bp, homo sapiens
ccaagaagatccaggcrgaacagtagaagacga

SEQ ID NO: 14603 - DNA, 33 bp, homo sapiens
ttggttttccacacaayggcaggagacagtgca

SEQ ID NO: 14604 - DNA, 33 bp, homo sapiens
cctgttctggatcccaytccatcttacttctta

SEQ ID NO: 14605 - DNA, 33 bp, homo sapiens
gttatacaaccaggaartagctgagcctagatc

SEQ ID NO: 14606 - DNA, 33 bp, homo sapiens
accactttggaaggaamgatgcttactgtgaca

SEQ ID NO: 14607 - DNA, 33 bp, homo sapiens
acattgctgactagaaktgaaagatgaattgct

SEQ ID NO: 14608 - DNA, 33 bp, homo sapiens
cagacttgcttttgggracgagctctgataaac

SEQ ID NO: 14609 - DNA, 33 bp, homo sapiens
ccagggcctgcacatcratgaggtagcttctac

SEQ ID NO: 14610 - DNA, 33 bp, homo sapiens
agacacacactgtaggkaattggctcctgcagc

SEQ ID NO: 14611 - DNA, 33 bp, homo sapiens
gcaatagcattaggcaraaaacgtggcatgtgt

SEQ ID NO: 14612 - DNA, 33 bp, homo sapiens
gggatgataggtcttcrctcacatggtaacaaa

SEQ ID NO: 14613 - DNA, 33 bp, homo sapiens
aaaagatgaaaaggagscatgtaccaggaagga

SEQ ID NO: 14614 - DNA, 33 bp, homo sapiens
gctctttgcaccagaayggatgctctgtttcct

SEQ ID NO: 14615 - DNA, 33 bp, homo sapiens
aaataaagcaggatgasggtatagagatccacc

SEQ ID NO: 14616 - DNA, 33 bp, homo sapiens
cctggtgccaagatcartagggttctctttgat

SEQ ID NO: 14617 - DNA, 33 bp, homo sapiens
ttttattatcacaaacrgcagttaaggactcga

SEQ ID NO: 14618 - DNA, 33 bp, homo sapiens
acgtgccgtatgttcartcagcttggcctctta

SEQ ID NO: 14619 - DNA, 33 bp, homo sapiens
gtgatggttggagaaaygggcacctggctttaa

SEQ ID NO: 14620 - DNA, 33 bp, homo sapiens
aaataaaaagcccccartaatgatgcctatgtc

SEQ ID NO: 14621 - DNA, 33 bp, homo sapiens
tgcagtggccattatcmaacaattgaaggttca

SEQ ID NO: 14622 - DNA, 33 bp, homo sapiens
gccctaagagattgacyacaaggctaacttgcc

SEQ ID NO: 14623 - DNA, 33 bp, homo sapiens
gctgtcatgccaaaggrcagtcttccagcgagg

SEQ ID NO: 14624 - DNA, 33 bp, homo sapiens
gaagagtgaagaaagcraagacaaaatttgcaa

SEQ ID NO: 14625 - DNA, 33 bp, homo sapiens
tgatgagtgttgggtgraggatgggaactttct

SEQ ID NO: 14626 - DNA, 33 bp, homo sapiens
cagccttcagagttgasagcactgaacagagat

SEQ ID NO: 14627 - DNA, 33 bp, homo sapiens
aagccaagtgaattaayagaagagggtcaagtg

SEQ ID NO: 14628 - DNA, 33 bp, homo sapiens
aagaggtcagtaccatyaaatgaagcagcatga

SEQ ID NO: 14629 - DNA, 33 bp, homo sapiens
ctatttaaagctgtggractagatgaaatcacc

SEQ ID NO: 14630 - DNA, 33 bp, homo sapiens
ggttgcaagaggaaacratgaaatcaatatggg

SEQ ID NO: 14631 - DNA, 33 bp, homo sapiens
gctctacttttaggaaytgactggctcaactag

SEQ ID NO: 14632 - DNA, 33 bp, homo sapiens
aaattggagctttgtcragggtaataatgatgg

SEQ ID NO: 14633 - DNA, 33 bp, homo sapiens
tgtgccactggacctcrcaagataagtttaagc

SEQ ID NO: 14634 - DNA, 33 bp, homo sapiens
ttgattcggaagctccrcaatatcaccaggaac

SEQ ID NO: 14635 - DNA, 33 bp, homo sapiens
ttgatgtgatgtccaargagtggccagtatgtg

SEQ ID NO: 14636 - DNA, 33 bp, homo sapiens
tatcttctatgttacgscatcctgagaacctgg

SEQ ID NO: 14637 - DNA, 33 bp, homo sapiens
ttggaggtatcaaaacrgcccacatctagtttg

SEQ ID NO: 14638 - DNA, 33 bp, homo sapiens
gcctccggccacagackaaaagctgcgctgtca

SEQ ID NO: 14639 - DNA, 33 bp, homo sapiens
tgaccatagcctctaartggtcttaatatagcc

SEQ ID NO: 14640 - DNA, 33 bp, homo sapiens
tcctgctgtggtcgccrggcacaaggaaagaaa

SEQ ID NO: 14641 - DNA, 33 bp, homo sapiens
tgaggagtcatttacartaagcatgtatgcatg

SEQ ID NO: 14642 - DNA, 33 bp, homo sapiens
gtaagcaagatttaaarcgtcaccaaaatgtaa

SEQ ID NO: 14643 - DNA, 33 bp, homo sapiens
cccgtgctaatgcacgraggctaatgcaggagg

SEQ ID NO: 14644 - DNA, 33 bp, homo sapiens
gacctcctgactctgasattgaagcaagaaagt

SEQ ID NO: 14645 - DNA, 33 bp, homo sapiens
tgtccaaaggctcgagraatgttggctctgccc

SEQ ID NO: 14646 - DNA, 33 bp, homo sapiens
tcatcacctgacctacraaatatatggtttggt

SEQ ID NO: 14647 - DNA, 33 bp, homo sapiens
gataattaaaatcaaargagaaagtgtttattg

SEQ ID NO: 14648 - DNA, 33 bp, homo sapiens
gagcccgcctggctcamaaatcccttcccatct

SEQ ID NO: 14649 - DNA, 33 bp, homo sapiens
gagggaactggcttackctgttggcacatttcc

SEQ ID NO: 14650 - DNA, 33 bp, homo sapiens
tttaaaatagcagaggraaaaaagttatcttca

SEQ ID NO: 14651 - DNA, 33 bp, homo sapiens
catagagggatctgaawtcgtccgggagggctt

SEQ ID NO: 14652 - DNA, 33 bp, homo sapiens
acggtgactaatttcgrcctgcacttgcctcac

SEQ ID NO: 14653 - DNA, 33 bp, homo sapiens
ggggactccaaggcagrcgaccagtatctaatg

SEQ ID NO: 14654 - DNA, 33 bp, homo sapiens
gcgaatgaactgggacragttattctttttgtg

SEQ ID NO: 14655 - DNA, 33 bp, homo sapiens
cttgctaaacaggttayggctcttctgtccaag

SEQ ID NO: 14656 - DNA, 33 bp, homo sapiens
tcgacaaatgtgattcycatcctttccaggtgg

SEQ ID NO: 14657 - DNA, 33 bp, homo sapiens
tgaaaaagttgagatasagaggaccacagactg

SEQ ID NO: 14658 - DNA, 33 bp, homo sapiens
ctgtcctctggccaggmatttgtgcttctccca

SEQ ID NO: 14659 - DNA, 33 bp, homo sapiens
gtgcaggtagaaacacrcttgcctcagaggctg

SEQ ID NO: 14660 - DNA, 33 bp, homo sapiens
cgtaggcactctgccgkagattaagggcaggga

SEQ ID NO: 14661 - DNA, 33 bp, homo sapiens
atcctttgttaggccakaatgttagtgtaaatt

SEQ ID NO: 14662 - DNA, 33 bp, homo sapiens
tgtcactttttggccaytggcattcccttcctt

SEQ ID NO: 14663 - DNA, 33 bp, homo sapiens
aaccctgaaaggaaacyctctgtggtctaaatg

SEQ ID NO: 14664 - DNA, 33 bp, homo sapiens
gccaccaagtgggtaaygaagacaatgtcgcca

SEQ ID NO: 14665 - DNA, 33 bp, homo sapiens
tgtagtacatttgattyaacaacgggaaacagc

SEQ ID NO: 14666 - DNA, 33 bp, homo sapiens
tatttaaatgcagtgcyaagggtttcatttaac

SEQ ID NO: 14667 - DNA, 33 bp, homo sapiens
aagccctgtaaataaaygaaggcacttctttgg

SEQ ID NO: 14668 - DNA, 33 bp, homo sapiens
ctgttctgagcacagasggtagtcaaaatctca

SEQ ID NO: 14669 - DNA, 33 bp, homo sapiens
acctttatgcttcaackcattattttcttacca

SEQ ID NO: 14670 - DNA, 33 bp, homo sapiens
tcttgcagcgctgcagraaggatggccacgttc

SEQ ID NO: 14671 - DNA, 33 bp, homo sapiens
gatctcagcggagtaakacacccggcatcggtc

SEQ ID NO: 14672 - DNA, 33 bp, homo sapiens
tctccgcacccccaagwagaagagaggaggcca

SEQ ID NO: 14673 - DNA, 33 bp, homo sapiens
gatgaagggagcccagsatttttagcgcagtga

SEQ ID NO: 14674 - DNA, 33 bp, homo sapiens
gtcaatacgtgataccyctggatgggataattt

SEQ ID NO: 14675 - DNA, 33 bp, homo sapiens
ggaaagacaggactccygccaaacacaattcca

SEQ ID NO: 14676 - DNA, 33 bp, homo sapiens
ctcgataccaagaaacygggtgcaaggccaggc

SEQ ID NO: 14677 - DNA, 33 bp, homo sapiens
gctgtgcttgagaaaaygcaaacaggctattag

SEQ ID NO: 14678 - DNA, 33 bp, homo sapiens
tttgagcactgaactcragggataaatggggaa

SEQ ID NO: 14679 - DNA, 33 bp, homo sapiens
gccctatgatacaaggycctaccaagagcacca

SEQ ID NO: 14680 - DNA, 33 bp, homo sapiens
aggagcgatgaaagaaygagtgaaaaagcactg

SEQ ID NO: 14681 - DNA, 33 bp, homo sapiens
gcccctgggtaaacgcygactcagatgcctgaa

SEQ ID NO: 14682 - DNA, 33 bp, homo sapiens
tatggagtcttaaagcrctgtttgcaagtttct

SEQ ID NO: 14683 - DNA, 33 bp, homo sapiens
ttgtttaagccacaaarcccgtggtattttgtt

SEQ ID NO: 14684 - DNA, 33 bp, homo sapiens
ttagaggattcctgcasgttaggataaaggaga

SEQ ID NO: 14685 - DNA, 33 bp, homo sapiens
ggcccctctatctgaawgtgggtagaggccaag

SEQ ID NO: 14686 - DNA, 33 bp, homo sapiens
atgtccacgtcagaaakctgctgaatatcttcg

SEQ ID NO: 14687 - DNA, 33 bp, homo sapiens
ctcccgaaaaggaatarcgctgaatcgtcacag

SEQ ID NO: 14688 - DNA, 33 bp, homo sapiens
aagcgatacgggtttasaggaaacactactgaa

SEQ ID NO: 14689 - DNA, 33 bp, homo sapiens
ggctctccccggggcaraagaactccaagccga

SEQ ID NO: 14690 - DNA, 33 bp, homo sapiens
agtttgcttgtcgttayattcagggagtttcaa

SEQ ID NO: 14691 - DNA, 33 bp, homo sapiens
taccaaagagaacaaaytgtgagataatagatt

SEQ ID NO: 14692 - DNA, 33 bp, homo sapiens
gctgcctgctccttgarggccatgatgtgacct

SEQ ID NO: 14693 - DNA, 33 bp, homo sapiens
gggatatctggtcacaycgaaaggcaaggaatc

SEQ ID NO: 14694 - DNA, 33 bp, homo sapiens
cgctgtgaatgagatgmagtttattttcattaa

SEQ ID NO: 14695 - DNA, 33 bp, homo sapiens
gatcgctggcccattayggtgtcaggaatgtgc

SEQ ID NO: 14696 - DNA, 33 bp, homo sapiens
ggggttgttcccaggcrataggtgaatttatac

SEQ ID NO: 14697 - DNA, 33 bp, homo sapiens
caaataagtgaaggaamccctccagccagtgtt

SEQ ID NO: 14698 - DNA, 33 bp, homo sapiens
tccccaccaaacatcargattgtcaaggagctt

SEQ ID NO: 14699 - DNA, 33 bp, homo sapiens
gctcaacatgcagcacraatctcaggcctggga

SEQ ID NO: 14700 - DNA, 33 bp, homo sapiens
tctgtagattgaaaacyatgagctcacatcatt

SEQ ID NO: 14701 - DNA, 33 bp, homo sapiens
gcacatacggtgtccaygccttaagcacacact

SEQ ID NO: 14702 - DNA, 33 bp, homo sapiens
gagactgtcagaaaacrggagtgagatgggaat

SEQ ID NO: 14703 - DNA, 33 bp, homo sapiens
gacacgtgaccttgaayggcggcttccccgtgt

SEQ ID NO: 14704 - DNA, 33 bp, homo sapiens
gcttagcagagtgtaaygttaagtagcacatct

SEQ ID NO: 14705 - DNA, 33 bp, homo sapiens
tattatgaataaagacrgctagtttagaacgat

SEQ ID NO: 14706 - DNA, 33 bp, homo sapiens
agcagatccgtatggartcataagaaaattctg

SEQ ID NO: 14707 - DNA, 33 bp, homo sapiens
gtgcgtgccatgtgtcyaccgggcccttccatg

SEQ ID NO: 14708 - DNA, 33 bp, homo sapiens
ttcctaaaagtgaaacraaccttgcgctctaca

SEQ ID NO: 14709 - DNA, 33 bp, homo sapiens
atttgtcagacgaccaygctcggatgtcacagg

SEQ ID NO: 14710 - DNA, 33 bp, homo sapiens
tctcaaagagtcggcakctcaggaaggtgcccc

SEQ ID NO: 14711 - DNA, 33 bp, homo sapiens
tggcgtgaggaagaacrctgcgattgtaaactc

SEQ ID NO: 14712 - DNA, 33 bp, homo sapiens
gggtgaatggatgctcraggcttttcctaacag

SEQ ID NO: 14713 - DNA, 33 bp, homo sapiens
aggcagctgcgggagawgagcaaacacgttgcc

SEQ ID NO: 14714 - DNA, 33 bp, homo sapiens
atgtctattttgtgtayaattctgcactttcaa

SEQ ID NO: 14715 - DNA, 33 bp, homo sapiens
tcttcccctctccccaractgacgaaggcatca

SEQ ID NO: 14716 - DNA, 33 bp, homo sapiens
cttctgctggaaccacrgccggtccaaaaggct

SEQ ID NO: 14717 - DNA, 33 bp, homo sapiens
tttcttacaggttttcmaagctagtagtggggg

SEQ ID NO: 14718 - DNA, 33 bp, homo sapiens
atccccacaaaagagaygatatgttgcacgatt

SEQ ID NO: 14719 - DNA, 33 bp, homo sapiens
gaagaagaggacaaagrcagtttcttatcatct

SEQ ID NO: 14720 - DNA, 33 bp, homo sapiens
gagcccctgatgtgaaycccggcgctacacctt

SEQ ID NO: 14721 - DNA, 33 bp, homo sapiens
aggaaatgtcaatcaayacctccgataaacatc

SEQ ID NO: 14722 - DNA, 33 bp, homo sapiens
tggttatgcggcaccakcagagcaaggctcggc

SEQ ID NO: 14723 - DNA, 33 bp, homo sapiens
cactcagacacggcgayggccccggattttgtg

SEQ ID NO: 14724 - DNA, 33 bp, homo sapiens
gaggaggttcaataaarcgttactggggtcagg
